(19) United States
(12) Patent Application Publication
(10) Pub. No.: US 2022/0133790 A1
(43) Pub. Date: May 5, 2022

(54) MODIFIED IMMUNE CELLS HAVING ENHANCED ANTI-NEOPLASIA ACTIVITY AND IMMUNOSUPPRESSION RESISTANCE

(71) Applicant: BEAM THERAPEUTICS INC., Cambridge, MA (US)

(72) Inventors: Jason Michael GEHRKE, Cambridge, MA (US); Aaron D. EDWARDS, Cambridge, MA (US); Ryan MURRAY, Cambridge, MA (US)

(73) Assignee: BEAM THERAPEUTICS INC., Cambridge, MA (US)

(21) Appl. No.: 17/423,428

(22) PCT Filed: Jan. 16, 2020
(86) PCT No.: PCT/US20/13964

§ 371 Date: Jul. 15, 2021

Related U.S. Application Data
(60) Provisional application No. 62/793,277, filed on Jan. 16, 2019.
(60) Provisional application No. 62/839,870, filed on Apr. 29, 2019.

(51) Int. Cl. A61K 35/17; C12N 5/0783; C12N 9/22; C12N 15/10; C12N 15/113

(52) U.S. Cl. CPC A61K 35/17; C12N 5/0636; C12N 9/22; C12N 15/102; C12N 2310/20; C12Y 305/04004; C12Y 305/04005; C12N 2510/00; C12N 15/113

(57) ABSTRACT

As described below, the present invention features genetically modified immune cells having enhanced anti-neoplasia activity, resistance to immune suppression, and decreased risk of eliciting a graft versus host reaction, or a combination thereof. The present invention also features methods for producing and using these modified immune effector cells.

### INCORPORATION BY REFERENCE

[0001] This application claims the benefit of U.S. Provisional Application No. 62/793,277 filed on Jan. 16, 2019 and U.S. Provisional Application No. 62/839,870 filed on Apr. 29, 2019.

### BACKGROUND OF THE INVENTION

[0002] Autologous and allogeneic immunotherapies are neoplasia treatment approaches in which immune cells expressing chimeric antigen receptors are administered to a subject. To generate an immune cell that expresses a chimeric antigen receptor (CAR), the immune cell is first collected from the subject (autologous) or a donor separate from the subject receiving treatment (allogeneic) and genetically modified to express the chimeric antigen receptor. The resulting cell expresses the chimeric antigen receptor on its cell surface (e.g., CAR T-cell), and upon administration to the subject, the chimeric antigen receptor binds to the marker expressed by the neoplastic cell. This interaction with the neoplasia marker activates the CAR-T cell, which then cell kills the neoplastic cell. But for autologous or allogeneic cell therapy to be effective and efficient, significant conditions and cellular responses, such as T cell signaling inhibition, must be overcome or avoided. For allogeneic cell therapy, graft versus host disease and host rejection of CAR-T cells may provide additional challenges. Editing genes involved in these processes can enhance CAR-T cell function and resistance to immunosuppression or inhibition, but current methodologies for making such edits have the potential to induce large, genomic rearrangements in the CAR-T cell, thereby negatively impacting its efficacy. Thus, there is a significant need for techniques to more precisely modify immune cells, especially CAR-T cells. This application is directed to this and other important needs.

### SUMMARY OF THE INVENTION

[0003] As described below, the present invention features genetically modified immune cells having enhanced anti-neoplasia activity, resistance to immune suppression, and decreased risk of eliciting a graft versus host reaction, or host versus graft reaction where host CD8⁺ T cells recognize a graft as non-self (e.g., where a transplant recipient generates an immune response against the transplanted organ), or a combination thereof. In one embodiment, a subject having or having a propensity to develop graft versus host disease (GVHD) is administered a CAR-T cell that lacks or has reduced levels of functional TRAC. In one embodiment, a subject having or having a propensity to develop host versus graft disease (HVGD) is administered a CAR-T cell that lacks or has reduced levels of functional beta2 microglobulin (B2M). The present invention also features methods for producing and using these modified immune cells.

[0004] In one aspect, provided herein is a method for producing a modified immune cell with reduced immunogenicity and/or increased anti-neoplasia activity by multiplexed editing, the method comprising: modifying at least four gene sequences or regulatory elements thereof, at a single target nucleobase in each thereof in an immune cell, thereby generating the modified immune cell with reduced immunogenicity and/or increased anti-neoplasia activity.

[0005] In another aspect, provided herein is a method for producing a population of modified immune cells with reduced immunogenicity and/or increased anti-neoplasia activity by multiplexed editing, the method comprising: modifying at least four gene sequences or regulatory elements thereof at a single target nucleobase in each thereof in a population of immune cells, thereby generating the population of modified immune cells with reduced immunogenicity and/or increased anti-neoplasia activity.

[0006] In some embodiments, the at least one of the at least four gene sequences is a checkpoint inhibitor gene sequence, an immune response regulation gene sequence, or an immunogenic gene sequence.

[0007] In some embodiments, the modifying reduces expression of at least one of the at least four gene sequences.

[0008] In some embodiments, the expression of at least one of the at least four genes is reduced by at least 80% as compared to a control cell without the modification.

[0009] In some embodiments, the expression of each one of the at least four genes is reduced by at least 80% as compared to a control cell without the modification.

[0010] In some embodiments, the expression of at least one of the at least four genes is reduced in at least 50% of the population of immune cells.

[0011] In some embodiments, the expression of each one of the at least four genes is reduced in at least 50% of the population of immune cells.

[0012] In some embodiments, the at least four gene sequences comprise a TRAC gene sequence.

[0013] In some embodiments, the at least four gene sequences comprise a check point inhibitor gene sequence.

[0014] In some embodiments, the at least four gene sequences comprise a PDCD1 gene sequence.

[0015] In some embodiments, the at least four gene sequences comprise a T cell marker gene sequence.

[0016] In some embodiments, the at least four gene sequences comprise a CD52 gene sequence.

[0017] In some embodiments, the at least four gene sequences comprises a CD7 gene sequence.

[0018] In some embodiments, the at least four gene sequences comprise a TRAC gene sequence, a PDCD1 gene sequence, a CD52 gene sequence, or a CD7 gene sequence.

[0019] In some embodiments, the at least four sequences comprise a TCR complex gene sequence, a CD7 gene sequence, a CD52 gene sequence, and a gene sequence selected from the group consisting of CIITA a CD2 gene sequence, a CD4 gene sequence, a CD5 gene sequence, a CD7 gene sequence, a CD30 gene sequence, a CD33 gene sequence, a CD52 gene sequence, a CD70 gene sequence, a B2M gene sequence, and a CIITA gene sequence

[0020] In some embodiments, the at least four gene sequences comprise a gene sequence selected from the group consisting of a CD2 gene sequence, a TRAC gene sequence, a CD3 epsilon gene sequence, a CD3 gamma gene sequence, a CD3 delta gene sequence, a TRBC1 gene sequence, a TRBC2 gene sequence, a CD4 gene sequence, a CD5 gene sequence, a CD7 gene sequence, a CD30 gene sequence, a CD33 gene sequence, a CD52 gene sequence, a CD70 gene sequence, a B2M gene sequence, and a CIITA gene sequence.

[0021] The method of some embodiments described herein comprises modifying five gene sequences or regulatory elements thereof at a single target nucleobase in each thereof in the immune cell.

[0022] The method of some embodiments described herein comprises modifying six gene sequences or regulatory elements thereof at a single target nucleobase in each thereof in the immune cell.

[0023] The method of some embodiments described herein comprises modifying seven gene sequences or regulatory elements thereof at a single target nucleobase in each thereof in the immune cell.

[0024] The method of some embodiments described herein comprises modifying eight gene sequences or regulatory elements thereof at a single target nucleobase in each thereof in the immune cell.

[0025] The method of some embodiments described herein comprises modifying five gene sequences or regulatory elements thereof at a single target nucleobase in each thereof in the population of immune cells.

[0026] The method of some embodiments described herein comprises modifying six gene sequences or regulatory elements thereof at a single target nucleobase in each thereof in the population of immune cells.

[0027] The method of some embodiments described herein comprises modifying seven gene sequences or regulatory elements thereof at a single target nucleobase in each thereof in the population of immune cells.

[0028] The method of some embodiments described herein modifying eight gene sequences or regulatory elements thereof at a single target nucleobase in each thereof in the population of immune cells.

[0029] In some embodiments, the five, six, seven, or eight gene sequences or regulatory elements thereof are selected from the group consisting of a CD2 gene sequence, a TRAC gene sequence, a CD3 epsilon gene sequence, a CD3 gamma gene sequence, a CD3 delta gene sequence, a TRBC1 gene sequence, a TRBC2 gene sequence, a CD4 gene sequence, a CD5 gene sequence, a CD7 gene sequence, a CD30 gene sequence, a CD33 gene sequence, a CD52 gene sequence, a CD70 gene sequence, a B2M gene sequence, and a CIITA gene sequence.

[0030] In some embodiments, the five, six, seven, or eight gene sequences or regulatory elements thereof at comprises a CD3 gene sequence, a CD7 gene sequence, a CD2 gene sequence, a CD5 gene sequence, and a CD52 gene sequence.

[0031] In some embodiments, the modifying comprises deaminating the single target nucleobase.

[0032] In some embodiments, the deaminating is performed by a polypeptide comprising a deaminase.

[0033] In some embodiments, the deaminase is associated with a nucleic acid programmable DNA binding protein (napDNAbp) to form a base editor.

[0034] In some embodiments, the deaminase is fused to the nucleic acid programmable DNA binding protein (napDNAbp).

[0035] In some embodiments, the napDNAbp comprises a Cas9 polypeptide or a portion thereof.

[0036] In some embodiments, the napDNAbp comprises a Cas9 nickase or nuclease dead Cas9.

[0037] In some embodiments, the deaminase is a cytidine deaminase.

[0038] In some embodiments, the single target nucleobase is a cytosine (C) and wherein the modification comprises conversion of the C to a thymine (T).

[0039] In some embodiments, the base editor further comprises a uracil glycosylase inhibitor.

[0040] In some embodiments, the deaminase is an adenosine deaminase.

[0041] In some embodiments, the single target nucleobase is a adenosine (A) and wherein the modification comprises conversion of the A to a guanine (G).

[0042] In some embodiments, the modifying comprises contacting the immune cell with a guide nucleic acid sequences.

[0043] In some embodiments, the modifying comprises contacting the immune cell with at least four guide nucleic acid sequences, wherein each guide nucleic acid sequence targets the napDNAbp to one of the at least four gene sequences or regulatory elements thereof.

[0044] In some embodiments, the guide nucleic acid sequence comprises a sequence selected from guide RNA sequences of table 8A, table 8B, or table 8C.

[0045] In some embodiments, the guide nucleic acid sequence comprises a sequence selected from the group consisting of UUCGUAUCUGUAAAACCAAG, CCUACCUGUCACCAGGACCA, CUCUUACCUGUACCAUAACC, CACCUACCUAAGAACCAUCC, ACUCACGCUGGAUAGCCUCC, ACUCACCCAGCAUCCCCAGC, CACUCACCUUAGCCUGAGCA, and CACGCACCUGGACAGCUGAC.

[0046] In some embodiments, the modifying comprises replacing the single target nucleobase with a different nucleobase by target-primed reverse transcription with a reverse transcriptase and an extended guide nucleic acid sequence.

[0047] In some embodiments, the extended guide nucleic acid sequence comprises a reverse transcription template sequence, a reverse transcription primer binding site, or a combination thereof.

[0048] In some embodiments, the single target nucleobase is in an exon.

[0049] In some embodiments, modifying generates a premature stop codon in the exon.

[0050] In some embodiments, the single target nucleobase is within an exon 1, an exon 2, or an exon 3 of the TRAC gene sequence.

[0051] In some embodiments, the single target nucleobase is within an exon 1, an exon 2, or an exon 5 of the PCDC1 gene sequence.

[0052] In some embodiments, the single target nucleobase is within an exon 1 or an exon 2 of the CD52 gene sequence.

[0053] In some embodiments, the single target nucleobase is within an exon 1, an exon 2, or an exon 3 of the CD7 gene sequence.

[0054] In some embodiments, the single target nucleobase is within an exon 1 or an exon 2 of the B2M gene sequence.

[0055] In some embodiments, the single target nucleobase is within an exon 2, an exon 3, an exon 4, an exon 5, an exon 6, an exon 7, or an exon 8 of the CD5 gene sequence.

[0056] In some embodiments, the single target nucleobase is within an exon 2, an exon 3, an exon 4, or an exon 5 of the CD2 gene sequence.

[0057] In some embodiments, the single target nucleobase is within an exon 1, an exon 2, an exon 4, an exon 7, an exon 8, an exon 9, an exon 10, an exon 11, an exon 12, an exon 14, an exon 15, an exon 18, or an exon 19 of the CIITA gene sequence.

[0058] In some embodiments, the single target nucleobase is in a splice donor site or a splice acceptor site.

[0059] In some embodiments, the single target nucleobase is in an exon 1 splice acceptor site, an exon 1 splice donor site, or an exon 3 splice acceptor site of the TRAC gene sequence.

[0060] In some embodiments, the single target nucleobase is in an exon 1 splice acceptor site, an exon 1 splice donor site, an exon 2 splice acceptor site, an exon 3 splice donor site, an exon 4 splice acceptor site, an exon 4 splice donor site, or an exon 5 splice acceptor site of the PDCD1 gene sequence.

[0061] In some embodiments, the single target nucleobase is in an exon 1 splice donor site, or an exon 2 splice acceptor site of the CD52 gene sequence.

[0062] In some embodiments, the single target nucleobase is in an exon 1 splice donor site, an exon 2 splice donor site, an exon 2 splice acceptor site, or an exon 3 splice acceptor site of the CD7 gene sequence.

[0063] In some embodiments, the single target nucleobase is in an exon 1 splice donor site, an exon 2 splice donor site, an exon 2 splice acceptor site, or an exon 3 splice acceptor site of the B2M gene sequence.

[0064] In some embodiments, the single target nucleobase is in an exon 3 splice donor site of the CD2 gene sequence.

[0065] In some embodiments, the single target nucleobase is in an exon 1 splice donor site, an exon 1 splice acceptor site, an exon 3 splice acceptor site, an exon 3 splice donor site, an exon 4 splice acceptor site, an exon 5 splice donor site, an exon 6 splice acceptor site, an exon 9 splice donor site, an exon 10 splice acceptor site of the CD5 gene sequence.

[0066] In some embodiments, the single target nucleobase is in an exon 1 splice donor site, an exon 7 splice donor site, an exon 8 splice acceptor site, an exon 9 slice donor site, an exon 10 splice acceptor site, an exon 11 splice acceptor site, an exon 14 splice acceptor site, an exon 14 splice donor site, an exon 15 splice donor site, an exon 16 splice acceptor site, an exon 16 splice donor site, an exon 17 splice acceptor site, an exon 17 splice donor site, or an exon 19 splice acceptor site of the CIITACIITA gene sequence.

[0067] In some embodiments, the immune cell is a human cell. In some embodiments, the immune cell is a cytotoxic T cell, a regulatory T cell, a T helper cell, a dendritic cell, a B cell, or a NK cell.

[0068] In some embodiments, the population of immune cells are human cells.

[0069] In some embodiments, the population of immune cells are cytotoxic T cells, regulatory T cells, T helper cells, dendritic cells, B cells, or NK cells.

[0070] In some embodiments, the modifying is ex vivo.

[0071] In some embodiments, the immune cell or the population of immune cells are derived from a single human donor.

[0072] In some embodiments, the method further comprising contacting the immune cell or the population of immune cells with a polynucleotide that encodes an exogenous functional chimeric antigen receptor (CAR) or a functional fragment thereof.

[0073] In some embodiments, contacting the immune cell or the population of immune cells with a lentivirus comprising the polynucleotide that encodes the CAR.

[0074] In some embodiments, contacting the immune cell or the population of immune cells with a napDNAbp and a donor DNA sequence comprising the polynucleotide that encodes the CAR.

[0075] In some embodiments, the napDNAbp is a Cas12b.

[0076] In some embodiments, the CAR specifically binds a marker associated with neoplasia.

[0077] In some embodiments, the neoplasia is a T cell cancer, a B cell cancer, a lymphoma, a leukemia, or a multiple myeloma.

[0078] In some embodiments the CAR specifically binds CD7.

[0079] In some embodiments, the CAR specifically binds BCMA.

[0080] In some embodiments, the immune cell or the population of immune cells comprises no detectable translocation. In some embodiments, at least 50% of the population of immune cells express the CAR. In some embodiments, at least 50% of the population of immune cells are viable. In some embodiments, at least 50% of the population of immune cells expand at least 80% of expansion rate of a population of control cells of a same type without the modification.

[0081] In the method of some embodiments described herein, the modifying generates less than 10% of indels in the immune cell. In some embodiments, the modifying generates less than 5% of non-target edits in the immune cell. In some embodiments, the modifying generates less than 5% of off-target edits in the immune cell.

[0082] In one aspect, provided herein is a modified immune cell produced according to some embodiments described in the preceding paragraphs.

[0083] In one aspect, provided herein is a population of modified immune cells produced according to some embodiments described in the preceding paragraphs.

[0084] In another aspect, provided herein is a modified immune cell with reduced immunogenicity or increased anti-neoplasia activity, wherein the modified immune cell comprises a single target nucleobase modification in each one of at least four gene sequences or regulatory elements thereof. In some embodiments, in the modified immune cell described above, each one of the at least four gene sequences is a checkpoint inhibitor gene sequence, an immune response regulation gene sequence, or an immunogenic gene sequence.

[0085] In the modified immune cell of the preceding embodiments the at least four gene sequences comprise a TCR complex gene sequence.

[0086] In some embodiments, the at least four gene sequences comprise a TRAC gene sequence. In some embodiments, the at least four gene sequences comprise a check point inhibitor gene sequence. In some embodiments, the at least four gene sequences comprise a PDCD1 gene sequence.

[0087] In some embodiments, the at least four gene sequences comprise a T cell marker gene sequence.

[0088] In some embodiments, the at least four gene sequences comprise CD52 gene sequence.

[0089] In some embodiments, the at least four gene sequences comprises a CD7 gene sequence.

[0090] In some embodiments, the expression of one of the at least four genes is reduced by at least 80% as compared to a control cell without the modification.

[0091] In some embodiments, the expression of each one of the at least four genes is reduced by at least 90% as compared to a control cell without the modification.

[0092] In some embodiments, the immune cell comprises a modification at a single target nucleobase in each one of five gene sequences or regulatory elements thereof, wherein each one of the five gene sequences is a checkpoint inhibitor gene sequence, an immune response regulation gene sequence, or an immunogenic gene sequence.

[0093] In some embodiments, the immune cell comprises a modification at a single target nucleobase in each one of six gene sequences or regulatory elements thereof, wherein each one of the six gene sequences is a checkpoint inhibitor gene sequence, an immune response regulation gene sequence, or an immunogenic gene sequence.

[0094] In some embodiments, the immune cell comprises a modification at a single target nucleobase in each one of seven gene sequences or regulatory elements thereof, wherein each one of the seven gene sequences is a checkpoint inhibitor gene sequence, an immune response regulation gene sequence or an immunogenic gene sequence.

[0095] In some embodiments, the immune cell comprises a modification at a single target nucleobase in each one of eight gene sequences or regulatory elements thereof, wherein each one of the eight gene sequences is a checkpoint inhibitor gene sequence, an immune response regulation gene sequence, or an immunogenic gene sequence.

[0096] In some embodiments, the expression of at least one of the five, six, seven or eight genes is reduced by at least 90% as compared to a control cell without the modification.

[0097] In some embodiments, the expression of each one of the five, six, seven, or eight genes is reduced by at least 90% as compared to a control cell without the modification.

[0098] In some embodiments, the five, six, seven, or eight gene sequences or regulatory elements thereof comprise a sequence selected from the group consisting of a CD2 gene sequence, a TRAC gene sequence, a CD3 epsilon gene sequence, a CD3 gamma gene sequence, a CD3 delta gene sequence, a TRBC1 gene sequence, a TRBC2 gene sequence, a CD4 gene sequence, a CD5 gene sequence, a CD7 gene sequence, a CD30 gene sequence, a CD33 gene sequence, a CD52 gene sequence, a CD70 gene sequence, a B2M gene sequence, and a CIITA gene sequence.

[0099] In one aspect, provided herein is a modified immune cell comprising a single target nucleobase modification in each one of a CD3 gene sequence, a CD5 gene sequence, a CD52 gene sequence, and a CD7 gene sequence, wherein the modified immune cell exhibits reduced immunogenicity or increased anti-neoplasia activity as compared to a control cell of a same type without the modification.

[0100] In some embodiments, the modified immune cell further comprises a single target nucleobase modification in a CD2 gene sequence, CIITA or a regulatory element of each thereof.

[0101] In some embodiments, the modified immune cell comprises a single target nucleobase modification in a TRAC gene sequence, a CD3 epsilon gene sequence, a CD3 gamma gene sequence, a CD3 delta gene sequence, a TRBC1 gene sequence, or a TRBC2 gene sequence further comprises a single target nucleobase modification in a gene sequence a CD4 gene sequence, a CD30 gene sequence, a CD33 gene sequence, a CD70 gene sequence, a B2M gene sequence, and a CIITA gene sequence or a regulatory element of each thereof.

[0102] In some embodiments, the modified immune cell comprises a single nucleobase modification in each one of a TRAC gene sequence, a PDCD1 gene sequence, a CD52 gene sequence, a CD7 gene sequence, a CD2 gene sequence, a CD5 gene sequence, a CIITA gene sequence, and a B2M gene sequence.

[0103] In some embodiments, the modified immune cell comprises no detectable translocation.

[0104] In some embodiments, the modified immune cell comprises less than 1% of indels.

[0105] In some embodiments, the modified immune cell comprises less than 5% of non-target edits.

[0106] In some embodiments, the modified immune cell comprises less than 5% of off-target edits.

[0107] In some embodiments, the modified immune has increased growth or viability compared to a reference cell. In some embodiments, the reference cell is an immune cell modified with a Cas9 nuclease.

[0108] In some embodiments, the modified immune cell is a mammalian cell.

[0109] In some embodiments, the modified immune cell is a human cell.

[0110] In some embodiments, the modified immune cell is a cytotoxic T cell, a regulatory T cell, a T helper cell, a dendritic cell, a B cell, or a NK cell.

[0111] In some embodiments, the modified the immune cell is in an ex vivo culture.

[0112] In some embodiments, the modified the immune cell is derived from a single human donor.

[0113] In some embodiments, the modified the immune cell further comprises a polynucleotide that encodes an exogenous functional chimeric antigen receptor (CAR) or a functional fragment thereof.

[0114] In some embodiments, the polynucleotide that encodes the CAR is integrated in the genome of the immune cell.

[0115] In some embodiments, the CAR specifically binds a marker associated with neoplasia.

[0116] In some embodiments, the neoplasia is a T cell cancer, a B cell cancer, a lymphoma, a leukemia, or a multiple myeloma.

[0117] In some embodiments, the CAR specifically binds CD7.

[0118] In some embodiments, the CAR specifically binds BCMA.

[0119] In some embodiments, the single target nucleobase is in an exon.

[0120] In some embodiments, the single target nucleobase is within an exon 1, an exon 2, or an exon 3 of the TRAC gene sequence.

[0121] In some embodiments, the single target nucleobase is within an exon 1, an exon 2, or an exon 5 of the PCDC1 gene sequence.

[0122] In some embodiments, the single target nucleobase is within an exon 1 or an exon 2 of the CD52 gene sequence.

[0123] In some embodiments, the single target nucleobase is within an exon 1, an exon 2, or an exon 3 of a CD7 gene sequence.

[0124] In some embodiments, the single target nucleobase is in a splice donor site or a splice acceptor site.

[0125] In some embodiments, the single target nucleobase is in an exon 1 splice acceptor site, an exon 1 splice donor site, or an exon 3 splice acceptor site of the TRAC gene sequence.

[0126] In some embodiments, the single target nucleobase is in an exon 1 splice acceptor site, an exon 1 splice donor site, an exon 2 splice acceptor site, an exon 3 splice donor site, an exon 4 splice acceptor site, an exon 4 splice donor site, or an exon 5 splice acceptor site of the PDCD1 gene sequence.

[0127] In some embodiments, the single target nucleobase is in an exon 1 splice donor site, or an exon 2 splice acceptor site of the CD52 gene sequence.

[0128] In some embodiments, the single target nucleobase is in an exon 1 splice donor site, an exon 2 splice donor site, an exon 2 splice acceptor site, or an exon 3 splice acceptor site of the CD7 gene sequence.

[0129] In one aspect, provided herein is a population of modified immune cells, wherein a plurality of the population of cells comprise a single target nucleobase modification in each one of at least four gene sequences or regulatory elements thereof, and wherein the plurality of the population of cells having the modification exhibit reduced immunogenicity or increased anti-neoplasia activity as compared to a plurality of control cells of a same type without the modification.

[0130] In some embodiments, the plurality of cells comprises at least 50% of the population.

[0131] In some embodiments, each one of the at least four gene sequences is a checkpoint inhibitor gene sequence, an immune response regulation gene sequence, or an immunogenic gene sequence.

[0132] In some embodiments, the at least four gene sequences comprise a TCR component gene sequence, a check point inhibitor gene sequence, or a T cell marker gene sequence.

[0133] In some embodiments, the at least four gene sequences comprise a TRAC gene sequence.

[0134] In some embodiments, the at least four gene sequences comprise a PDCD1 gene sequence.

[0135] In some embodiments, the at least four gene sequences comprise CD52 gene sequence.

[0136] In some embodiments, the at least four gene sequences comprises a CD7 gene sequence.

[0137] In the population of some embodiments, expression of at least one of the at least four genes is reduced by at least 80% in the plurality of cells having the modification as compared to a control cell without the modification

[0138] In the population of some embodiments, expression of each one of the at least four genes is reduced by at least 80% in the plurality of cells having the modification as compared to a control cell without the modification.

[0139] In some embodiments, the plurality of the population comprises a modification at a single target nucleobase in each one of five gene sequences or regulatory elements thereof, wherein each one of the five gene sequences is a checkpoint inhibitor gene sequence, an immune response regulation gene sequence, or an immunogenic gene sequence.

[0140] In some embodiments, the plurality of the population comprises a modification at a single target nucleobase in each one of six gene sequences or regulatory elements thereof, wherein each one of the six sequences is a checkpoint inhibitor gene sequence, an immune response regulation gene sequence, or an immunogenic gene sequence

[0141] In some embodiments, the plurality of the population comprises a modification at a single target nucleobase in each one of seven gene sequences or regulatory elements thereof, wherein each one of the seven gene sequences is a checkpoint inhibitor gene sequence, an immune response regulation gene sequence, or an immunogenic gene sequence.

[0142] In some embodiments, the plurality of the population comprises a modification at a single target nucleobase in each one of eight gene sequences or regulatory elements thereof, wherein each one of the eight gene sequences is a checkpoint inhibitor gene sequence, an immune response regulation gene sequence, or an immunogenic gene sequence.

[0143] In the population of some embodiments, the expression of at least one of the five, six, seven, or eight genes is reduced by at least 90% in the plurality of cells having the modification as compared to a control cell without the modification.

[0144] In the population of some embodiments, the expression of each one of the five, six, seven, or eight genes is reduced by at least 90% in the plurality of cells having the modification as compared to a control cell without the modification.

[0145] In the population of some embodiments, the expression of at least one of the five, six, seven, or eight genes is reduced by at least 90% in the plurality of cells having the modification as compared to a control cell without the modification.

[0146] In some embodiments, the expression of each one of the five, six, seven, or eight genes is reduced by at least 90% in the plurality of cells having the modification as compared to a control cell without the modification.

[0147] In some embodiments, the five, six, seven, or eight gene sequences or regulatory elements thereof are selected from the group consisting of a CD2 gene sequence, a TRAC gene sequence, a CD3 epsilon gene sequence, a CD3 gamma gene sequence, a CD3 delta gene sequence, a TRBC1 gene sequence, a TRBC2 gene sequence, a CD4 gene sequence, a CD5 gene sequence, a CD7 gene sequence, a CD30 gene sequence, a CD33 gene sequence, a CD52 gene sequence, a CD70 gene sequence, a B2M gene sequence, and a CIITA gene sequence.

[0148] In one aspect, provided herein is a population of modified immune cells, wherein a plurality of the population comprise a single target nucleobase modification in each one of a TRAC gene sequence, a PDCD1 gene sequence, a CD52 gene sequence, and a CD7 gene sequence, and wherein the plurality of the population having the modification exhibit reduced immunogenicity or increased anti-neoplasia activity as compared to a plurality of control cells of a same type without the modification.

[0149] In some embodiments, the plurality of the population further comprises a single target nucleobase modification in a CD2 gene sequence, a CD5 gene sequence, a CIITA gene sequence, a B2M gene sequence, or a regulatory element of each thereof. In some embodiments, the plurality of the population further comprises a single target nucleobase modification in a gene sequence of a gene selected from the group consisting of a CD2 gene sequence, a TRAC gene sequence, a CD3 epsilon gene sequence, a CD3 gamma gene sequence, a CD3 delta gene sequence, a TRBC1 gene sequence, a TRBC2 gene sequence, a CD4 gene sequence, a CD5 gene sequence, a CD7 gene sequence, a CD30 gene sequence, a CD33 gene sequence, a CD52 gene sequence, a CD70 gene sequence, a B2M gene sequence, and a CIITA gene sequence or a regulatory element of each thereof. In some embodiments, the plurality of the population comprises a single nucleobase modification in each one of a TRAC gene sequence, a PDCD1 gene sequence, a CD52 gene sequence, a CD7 gene sequence, a CD2 gene sequence, a CD5 gene sequence, a CIITA gene sequence, and a B2M gene sequence.

[0150] In the population of modified immune cells of some embodiments, the plurality of the population comprises no detectable translocation.

[0151] In the population of modified immune cells of some embodiments, the at least 60% of the population of immune cells are viable. In the population of modified immune cells of some embodiments, the at least 60% of the population of immune cells expand at least 80% of expansion rate of a population of control cells of a same type without the modification. In the population of modified immune cells of some embodiments, the population of immune cells are human cells. In the population of modified immune cells of some embodiments, the population of immune cells are cytotoxic T cells, regulatory T cells, T helper cells, dendritic cells, B cells, or NK cells. In the population of modified immune cells of some embodiments, the population of immune cells are derived from a single human donor. In the population of modified immune cells of some embodiments, the plurality of cells having the modification further comprises a polynucleotide that encodes an exogenous functional chimeric antigen receptor (CAR) or a functional fragment thereof.

[0152] In some embodiments, the at least 50% of the population of immune cells express the CAR.

[0153] In some embodiments, the the CAR specifically binds a marker associated with neoplasia.

[0154] In some embodiments, the neoplasia is a T cell cancer, a B cell cancer, a lymphoma, a leukemia, or a multiple myeloma.

[0155] In some embodiments, the CAR specifically binds CD7.

[0156] In some embodiments, the CAR specifically binds BCMA.

[0157] In some embodiments, the single target nucleobase is in an exon.

[0158] In some embodiments, the single target nucleobase is within an exon 1, an exon 2, or an exon 3 of the TRAC gene sequence.

[0159] In some embodiments, the single target nucleobase is within an exon 1, an exon 2, or an exon 5 of the PCDC1 gene sequence.

[0160] In some embodiments, the single target nucleobase is within an exon 1 or an exon 2 of the CD52 gene sequence.

[0161] In some embodiments, the single target nucleobase is within an exon 1, an exon 2, or an exon 3 of a CD7 gene sequence.

[0162] In the population of modified immune cells of some embodiments, the single target nucleobase is in a splice donor site or a splice acceptor site.

[0163] In some embodiments, the single target nucleobase is in an exon 1 splice acceptor site, an exon 1 splice donor site, or an exon 3 splice acceptor site of the TRAC gene sequence.

[0164] In some embodiments, the single target nucleobase is in an exon 1 splice acceptor site, an exon 1 splice donor site, an exon 2 splice acceptor site, an exon 3 splice donor site, an exon 4 splice acceptor site, an exon 4 splice donor site, or an exon 5 splice acceptor site of the PDCD1 gene sequence.

[0165] In some embodiments, the single target nucleobase is in an exon 1 splice donor site, or an exon 2 splice acceptor site of the CD52 gene sequence.

[0166] In some embodiments, the single target nucleobase is in an exon 1 splice donor site, an exon 2 splice donor site, an exon 2 splice acceptor site, or an exon 3 splice acceptor site of the CD7 gene sequence.

[0167] In one aspect, provided herein is a composition comprising deaminase and a nucleic acid sequence, wherein the guide nucleic acid sequence comprises a sequence selected from the group consisting of UUCGUAUCUGUAAAACCAAG, CCUACCUGUCACCAGGACCA, CUCUUACCUGUACCAUAACC, CACCUACCUAAGAACCAUCC, ACUCACGCUGGAUAGCCUCC, ACUCACCCAGCAUCCCCAGC, CACUCACCUUAGCCUGAGCA, and CACGCACCUGGACAGCUGAC.

[0168] In some embodiments, the deaminase is associated with a nucleic acid programmable DNA binding protein (napDNAbp) to form a base editor.

[0169] In some embodiments, the napDNAbp comprises a Cas9 nickase or nuclease dead Cas9 and wherein the deaminase is a cytidine deaminase.

[0170] In some embodiments, the base editor further comprises a uracil glycosylase inhibitor.

[0171] In some embodiments, the napDNAbp comprises a Cas9 nickase or nuclease dead Cas9 and wherein the deaminase is a adenosine deaminase.

[0172] In one aspect, provided herein is a composition comprising a polymerase and a guide nucleic acid sequence, wherein the guide nucleic acid sequence comprises a sequence selected from the group consisting of the group consisting of UUCGUAUCUGUAAAACCAAG, CCUACCUGUCACCAGGACCA, CUCUUACCUGUACCAUAACC, CACCUACCUAAGAACCAUCC, ACUCACGCUGGAUAGCCUCC, ACUCACCCAGCAUCCCCAGC, CACUCACCUUAGCCUGAGCA, and CACGCACCUGGACAGCUGAC.

[0173] In some embodiments, the polymerase is a reverse transcriptase and wherein the guide nucleic acid sequence is an extended guide nucleic acid sequence comprising a reverse transcription template sequence, a reverse transcription primer binding site, or a combination thereof.

[0174] In one aspect, provided herein is a method for producing a modified immune cell with reduced immunogenicity and/or increased anti-neoplasia activity, the method comprising: a) modifying a single target nucleobase in a first gene sequence or a regulatory element thereof in an immune cell; and b) modifying a second gene sequence or a regulatory element thereof in the immune cell with a Cas12 polypeptide, wherein the Cas12 polypeptide generates a site-specific cleavage in the second gene sequence; wherein each of the first gene and the second gene is a immunogenic gene, a checkpoint inhibitor gene, or an immune response regulation gene, thereby generating a modified immune cell with reduced immunogenicity and/or increased anti-neoplasia activity.

[0175] In some embodiments, the method further comprises expressing an exogenous functional chimeric antigen receptor (CAR) or a functional fragment thereof in the immune cell.

[0176] In some embodiments, a polynucleotide encoding the CAR or the functional fragment thereof is inserted into the site specific cleavage generated by the Cas12 polypeptide.

[0177] In some embodiments, the Cas12 polypeptide is a Cas12b polypeptide.

[0178] In one aspect, provided herein is a method for producing a modified immune cell with reduced immunogenicity and/or increased anti-neoplasia activity, the method comprising:

[0179] a) modifying a single target nucleobase in a first gene sequence or a regulatory element thereof in an immune cell; and b) modifying a second gene sequence or a regulatory element thereof in the immune cell by inserting an exogenous functional chimeric antigen receptor (CAR) or a functional fragment thereof or an exogenous functional T cell receptor or a functional fragment thereof in the second gene; wherein each of the first gene and the second gene is a immunogenic gene, a checkpoint inhibitor gene, or an immune response regulation gene, thereby generating a modified immune cell with reduced immunogenicity and/or increased anti-neoplasia activity.

[0180] In some embodiments, the step b) further comprises generating a site-specific cleavage in the second gene sequence with a nucleic acid programmable DNA binding protein (napDNAbp).

[0181] In some embodiments, the napDNAbp is a Cas12b.

[0182] In some embodiments, the expression of the first gene is reduced by at least 60% or wherein expression of the second gene is reduced by at least 60% as compared to a control cell of a same type without the modification.

[0183] In some embodiments, the first gene is selected from the group consisting of CD3 epsilon, CD3 gamma, CD3 delta, CD4, TRAC, TRBC1, TRBC2, PDCD1, CD30, CD33, CD7, CD52, B2M, CD70, CIITA, CD2, and CD5.

[0184] In some embodiments, the first gene or the second gene is selected from the group consisting of TRAC, CIITA, CD2, CD5, CD7, and CD52.

[0185] In some embodiments, the second gene is TRAC.

[0186] In some embodiments, the step a) further comprises modifying a single target nucleobase in two other gene sequences or regulatory elements thereof.

[0187] In some embodiments, the step a) further comprises modifying a single target nucleobase in three other gene sequences or regulatory elements thereof.

[0188] In some embodiments, the step a) further comprises modifying a single target nucleobase in four other gene sequences or regulatory elements thereof.

[0189] In some embodiments, the step a) further comprises modifying a single target nucleobase in five other gene sequences or regulatory elements thereof.

[0190] In some embodiments, the step a) further comprises modifying a single target nucleobase in six other gene sequences or regulatory elements thereof.

[0191] In some embodiments, the step a) further comprises modifying a single target nucleobase in seven other gene sequences or regulatory elements thereof.

[0192] In some embodiments, the modifying in step a) comprises deaminating the single target nucleobase with a base editor comprising a deaminase and a nucleic acid programmable DNA binding protein (napDNAbp).

[0193] In some embodiments, the napDNAbp comprises a Cas9 nickase or nuclease dead Cas9.

[0194] In some embodiments, the deaminase is a cytidine deaminase and wherein the modification comprises conversion of a cytidine (C) to a thymine (T).

[0195] In some embodiments, the deaminase is an adenosine deaminase and wherein the modification comprises conversion of an adenine (A) to a guanine (G).

[0196] In some embodiments, the modifying in a) comprises contacting the immune cell with a guide nucleic acid sequence.

[0197] In some embodiments, the guide nucleic acid sequence comprises a sequence selected from the group consisting of UUCGUAUCUGUAAAACCAAG, CCUACCUGUCACCAGGACCA, CUCUUACCUGUACCAUAACC, CACCUACCUAAGAACCAUCC, ACUCACGCUGGAUAGCCUCC, ACUCACCCAGCAUCCCCAGC, CACUCACCUUAGCCUGAGCA, and CACGCACCUGGACAGCUGAC.

[0198] In some embodiments, the modifying in b) comprises contacting the immune cell with a guide nucleic acid sequence.

[0199] In some embodiments, the guide nucleic acid sequence comprises a sequence selected from sequences in Table 1.

[0200] In some embodiments, the modifying in a) comprises replacing the single target nucleobase with a different nucleobase by target-primed reverse transcription with a reverse transcriptase and an extended guide nucleic acid sequence, wherein the extended guide nucleic acid sequence comprises a reverse transcription template sequence, a reverse transcription primer binding site, or a combination thereof.

[0201] In some embodiments, wherein the modifying in a) and b) generates less than 1% indels in the immune cell.

[0202] In some embodiments, the modifying in a) and b) generates less than 5% off target modification in the immune cell.

[0203] In some embodiments, the modifying in a) and b) generate less than 5% non-target modification in the immune cell.

[0204] In some embodiments, the immune cell is a human cell.

[0205] In some embodiments, the immune cell is a cytotoxic T cell, a regulatory T cell, a T helper cell, a dendritic cell, a B cell, or a NK cell.

[0206] In some embodiments, the CAR specifically binds a marker associated with neoplasia.

[0207] In some embodiments, the CAR specifically binds CD7.

[0208] In one aspect, provided herein is a modified immune cell with reduced immunogenicity and/or increased anti-neoplasia activity, wherein the modified immune cell comprises:

[0209] a) a single target nucleobase modification in a first gene sequence or a regulatory element thereof; and b) a modification in a second gene sequence or a regulatory element thereof, wherein the modification is a Cas12 polypeptide generated site-specific cleavage; wherein each of the first gene and the second gene is a immunogenic gene, a checkpoint inhibitor gene, or an immune response regulation gene. In one embodiment, the immune cell further comprises an exogenous functional chimeric antigen receptor (CAR) or a functional fragment thereof.

[0210] In some embodiments, a polynucleotide encoding the CAR or the functional fragment thereof is inserted into the site specific cleavage generated by the Cas12 polypeptide.

[0211] In one aspect, provided herein is a modified immune cell with reduced immunogenicity and/or increased anti-neoplasia activity, the modified immune cell comprising: a) a single target nucleobase modification in a first gene sequence or a regulatory element thereof in an immune cell; and b) a modification in a second gene sequence or a regulatory element thereof, wherein the modification is an insertion of an exogenous chimeric antigen receptor (CAR) or a functional fragment thereof or an exogenous T cell receptor or a functional fragment thereof; wherein each of the first gene and the second gene is a immunogenic gene, a checkpoint inhibitor gene, or immune response regulation gene.

[0212] In some embodiments, the modification in b) is generated by a site-specific cleavage with a Cas12b.

[0213] In some embodiments, expression of the first gene is reduced by at least 60% or wherein expression of the second gene is reduced by at least 60% as compared to a control cell of a same type without the modification.

[0214] In some embodiments, the first gene or the second gene is selected from the group consisting of CD3 epsilon, CD3 gamma, CD3 delta, CD4, TRAC, TRBC1, TRBC2, PDCD1, CD30, CD33, CD7, CD52, B2M, CD70, CIITA, CD2, and CD5.

[0215] In some embodiments, the first gene or the second gene is selected from the group consisting of TRAC, CD2, CD5, CD7, and CD52.

[0216] In some embodiments, the second gene is TRAC.

[0217] In some embodiments, the immune cell further comprises modification in a single target nucleobase in two other gene sequences or regulatory elements thereof.

[0218] In some embodiments, the immune cell further comprises modification in a single target nucleobase in three other gene sequences or regulatory elements thereof.

[0219] In some embodiments, the immune cell further comprises modification in a single target nucleobase in four other gene sequences or regulatory elements thereof.

[0220] In some embodiments, the immune cell further comprises modification in a single target nucleobase in five other gene sequences or regulatory elements thereof.

[0221] In some embodiments, the immune cell further comprises modification in a single target nucleobase in six other gene sequences or regulatory elements thereof.

[0222] In some embodiments, the immune cell further comprises modification in a single target nucleobase in seven other gene sequences or regulatory elements thereof.

[0223] In some embodiments, the modification in a) is generated by a base editor comprising a deaminase and a nucleic acid programmable DNA binding protein (napDNAbp).

[0224] In some embodiments, the deaminase is a cytidine deaminase and the modification comprises conversion of a cytidine (C) to a thymine (T).

[0225] In some embodiments, the deaminase is an adenosine deaminase and wherein the modification comprises conversion of an adenine (A) to a guanine (G).

[0226] In some embodiments, the immune cell comprises less than 1% indels in the genome.

[0227] In some embodiments, the immune cell is a human cell.

[0228] In some embodiments, the immune cell is a cytotoxic T cell, a regulatory T cell, a T helper cell, a dendritic cell, a B cell, or a NK cell.

[0229] In some embodiments, the CAR specifically binds a marker associated with neoplasia.

[0230] In some embodiments, the CAR specifically binds CD7.

[0231] In some embodiments, the modification in b) is an insertion in exon 1 in the TRAC gene sequence.

[0232] In one aspect, provided herein is a population of modified immune cells, wherein a plurality of the population of immune cells comprises: a) a single target nucleobase modification in a first gene sequence or a regulatory element thereof in an immune cell; and b) a modification in a second gene sequence or a regulatory element thereof, wherein the modification is a Cas12 polypeptide generated site-specific cleavage; wherein each of the first gene and the second gene is a immunogenic gene, a checkpoint inhibitor gene, or an immune response regulation gene, and wherein the plurality of the population comprises an exogenous chimeric antigen receptor (CAR) or a functional fragment thereof.

[0233] In some embodiments, a polynucleotide encoding the CAR or the functional fragment thereof is inserted into the site specific cleavage generated by the Cas12 polypeptide.

[0234] In one aspect, provided herein is a population of modified immune cells, wherein a plurality of the population of immune cells comprises: a) a single target nucleobase modification in a first gene sequence or a regulatory element thereof; and b) a modification in a second gene sequence or a regulatory sequence thereof, wherein the modification is an insertion of an exogenous chimeric antigen receptor (CAR) or a functional fragment thereof or an exogenous T cell receptor or a functional fragment thereof; wherein each of the first gene and the second gene is a immunogenic gene, a checkpoint inhibitor gene, or immune response regulation gene, and wherein the plurality of cells with the modification in a) or b) exhibit reduced immunogenicity and/or increased anti-neoplasia activity. In some embodiments, the modification in b) is generated by a site-specific cleavage with a Cas12b. In some embodiments, expression of the first gene is reduced by at least 60% or wherein expression of the second gene is reduced by at least 60% in the plurality of cells with the modification in a) or b) as compared to plurality of control cells of a same type without the modification.

[0235] In some embodiments, the first gene or the second gene is selected from the group consisting of CD3 epsilon, CD3 gamma, CD3 delta, CD4, TRAC, TRBC1, TRBC2, PDCD1, CD30, CD33, CD7, CD52, B2M, CD70, CIITA, CD2, and CD5.

[0236] In some embodiments, the first gene or the second gene is selected from the group consisting of TRAC, CIITA, CD2, CD5, CD7, and CD52.

[0237] In some embodiments, the first gene is TRAC, CD7, or CD52.

[0238] In some embodiments, the second gene is TRAC.

[0239] In some embodiments, the plurality of cells with the modification in a) or b) further comprises a modification in a single target nucleobase in two other gene sequences or regulatory elements thereof.

[0240] In some embodiments, the plurality of cells with the modification in a) or b) further comprises a single target nucleobase in three, four, five, or six other gene sequences or regulatory elements thereof.

[0241] In some embodiments, the modification in a) is generated by a base editor comprising a deaminase and a nucleic acid programmable DNA binding protein (napDNAbp) to form a base editor.

[0242] In some embodiments, the deaminase is a cytidine deaminase and wherein the modification comprises conversion of a cytidine (C) to a thymine (T).

[0243] In some embodiments, the deaminase is an adenosine deaminase and wherein the modification comprises conversion of an adenine (A) to a guanine (G).

[0244] In some embodiments, the base editor further comprises a uracil glycosylase inhibitor.

[0245] In some embodiments, at least 60% of the population of immune cells are viable.

[0246] In some embodiments, at least 60% of the population of immune cells expand at least 80% of expansion rate of a population of control cells of a same type without the modification.

[0247] In some embodiments, the population of modified immune cells have increased yield of modified immune cells compared to a reference population of cells. In some embodiments, the reference population is a population of immune cells modified with a Cas9 nuclease.

[0248] In some embodiments, the immune cells are a human cells.

[0249] In some embodiments, the immune cells is are cytotoxic T cells, regulatory T cells, T helper cells, dendritic cells, B cells, or NK cells.

[0250] In some embodiments, the CAR specifically binds a marker associated with neoplasia.

[0251] In some embodiments, the CAR specifically binds CD7.

[0252] In some embodiments, the modification in b) is an insertion in exon 1 in the TRAC gene sequence.

[0253] In one aspect, provided herein is a method for producing a modified immune cell with increased anti-neoplasia activity, the method comprising: modifying a single target nucleobase in a Cbl Proto Oncogene B (CBLB) gene sequence or a regulatory element thereof in an immune cell, wherein the modification reduces an activation threshold of the immune cell compared with an immune cell lacking the modification; thereby generating a modified immune cell with increased anti-neoplasia activity.

[0254] In one aspect, provided herein is a composition comprising a modified immune cell with increased anti-neoplasia activity, wherein the modified immune cell comprises: a modification in a single target nucleobase in a Cbl Proto-Oncogene B (CBLB) gene sequence or a regulatory element thereof, wherein the modified immune cell exhibits a reduced activation threshold compared with a control immune cell of a same type without the modification.

[0255] In one aspect, provided herein is a population of immune cells, wherein a plurality of the population of immune cells comprises: a modification in a single target nucleobase in a CBLB gene sequence or a regulatory element thereof, wherein the plurality of the population of the immune cells comprising the modification exhibit a reduced activation threshold compared with an control population of immune cells of a same type without the modification.

[0256] In one aspect, provided herein is a method for producing a population of modified immune cells with increased anti-neoplasia activity, the method comprising: modifying a single target nucleobase in a Cbl Proto Oncogene B (CBLB) gene sequence or a regulatory element thereof in a population of immune cells, wherein at least 50% of the population of immune cells are modified to comprise the single target nucleobase modification.

[0257] In one aspect, provided herein is a composition comprising at least four different guide nucleic acid sequences for base editing. In some embodiments, the composition further comprising a polynucleotide encoding a base editor polypeptide, wherein the base editor polypeptide comprises a nucleic acid programmable DNA binding protein (napDNAbp) and a deaminase. In some embodiments, the polynucleotide encoding the base editor is a mRNA sequence.

[0258] In some embodiments, the deaminase is a cytidine deaminase or an adenosine deaminase.

[0259] In some embodiments, the composition further comprises a base editor polypeptide, wherein the base editor polypeptide comprises a nucleic acid programmable DNA binding protein (napDNAbp) and a deaminase.

[0260] In some embodiments, the deaminase is a cytidine deaminase or an adenosine deaminase.

[0261] In some embodiments, the composition further comprises a lipid nanoparticle.

[0262] In some embodiments, the at least four guide nucleic acid sequences each hybridize with a gene sequence selected from the group consisting of CD2, CD3 epsilon, CD3 gamma, CD3 delta, CD4, CD5, CD7, CD30, CD33, CD52, CD70, and CIITA. In some embodiments, the at least 1, 2, 3, 4, 5, 6, 7, 8, or more genes or regulatory elements thereof are selected from CD2, CD3 epsilon, CD3 gamma, CD3 delta, CD4, CD5, CD7, CD30, CD33, CD52, CD70, and CIITA.

[0263] In some embodiments, the at least 1, 2, 3, 4, 5, 6, 7, 8, or more genes or regulatory elements thereof comprise one or more genes selected from CD2, CD3 epsilon, CD3 gamma, CD3 delta, CD4, CD5, CD7, CD30, CD33, CD52, CD70, and CIITA. In some embodiments, the at least 1, 2, 3, 4, 5, 6, 7, 8, or more genes or regulatory elements thereof are selected from ACAT1, ACLY, ADORA2A, AXL, B2M, BATF, BCL2L11, BTLA, CAMK2D, cAMP, CASP8, Cblb, CCR5, CD2, CD3D, CD3E, CD3G, CD4, CD5, CD7, CD8A, CD33, CD38, CD52, CD70, CD82, CD86, CD96, CD123, CD160, CD244, CD276, CDK8, CDKN1B, Chi311, CIITA, CISH, CSF2CSK, CTLA-4, CUL3, Cyp11a1, DCK, DGKA, DGKZ, DHX37, ELOB (TCEB2), ENTPD1 (CD39), FADD, FAS, GATA3, IL6, IL6R, IL10, IL10RA, IRF4, IRF8, JUNB, Lag3, LAIR-1 (CD305), LDHA, LIF, LYN, MAP4K4, MAPK14, MCJ, MEF2D, MGAT5, NR4A1, NR4A2, NR4A3, NT5E (CD73), ODC1, OTULINL (FAM105A), PAG1, PDCD1, PDIA3, PHD1 (EGLN2), PHD2 (EGLN1), PHD3 (EGLN3), PIK3CD, PIKFYVE, PPARa, PPARd, PRDMI1, PRKACA, PTEN, PTPN2, PTPN6, PTPN11, PVRIG (CD112R), RASA2, RFXANK, SELPG/PSGL1, SIGLEC1S, SLA, SLAMF7, SOCS1, Spry1, Spry2, STK4, SUV39, H1TET2, TGFbRII, TIGIT, Tim-3, TMEM222, TNFAIP3, TNFRSF8 (CD30), TNFRSF10B, TOX, TOX2, TRAC, TRBC1, TRBC2, UBASH3A, VHL, VISTA, In some embodiments, the at least four guide nucleic acid sequences each hybridize with a gene sequence selected from the group consisting of CD3epsilon, CD3 delta, CD3 gamma, TRAC, TRBC1, and TRBC2, CD2, CD5, CD7, CD52, CD70, and CIITA.

[0264] In some embodiments, the at least four guide nucleic acid sequences comprise a sequence selected from the group consisting of UUCGUAUCUGUAAAACCAAG, CCUACCUGUCACCAGGACCA, CUCUUACCUGUACCAUAACC, CACCUACCUAAGAACCAUCC, ACUCACGCUGGAUAGCCUCC, ACUCACCCAGCAUCCCCAGC, CACUCACCUUAGCCUGAGCA, and CACGCACCUGGACAGCUGAC.

[0265] In one aspect, provided herein is an immune cell comprising the composition of some of the embodiments described above, wherein the composition is introduced into the immune cell with electroporation.

[0266] In one aspect, provided herein is an immune cell comprising the composition of some of the embodiments described above, wherein the composition is introduced into the immune cell with electroporation, nucleofection, viral transduction, or a combination thereof.

[0267] Other features and advantages of the invention will be apparent from the detailed description, and from the claims.

### Definitions

[0268] Unless defined otherwise, all technical and scientific terms used herein have the meaning commonly understood by a person skilled in the art to which this invention belongs. The following references provide one of skill with a general definition of many of the terms used in this invention: Singleton et al., Dictionary of Microbiology and Molecular Biology (2nd ed. 1994); The Cambridge Dictionary of Science and Technology (Walker ed., 1988); The Glossary of Genetics, 5th Ed., R. Rieger et al. (eds.), Springer Verlag (1991); and Hale & Marham, The Harper Collins Dictionary of Biology (1991). As used herein, the following terms have the meanings ascribed to them below, unless specified otherwise.

[0269] By “adenosine deaminase” is meant a polypeptide or fragment thereof capable of catalyzing the hydrolytic deamination of adenine or adenosine. In some embodiments, the deaminase or deaminase domain is an adenosine deaminase catalyzing the hydrolytic deamination of adenosine to inosine or deoxyadenosine to deoxyinosine. In some embodiments, the adenosine deaminase catalyzes the hydrolytic deamination of adenine or adenosine in deoxyribonucleic acid (DNA). The adenosine deaminases (e.g., engineered adenosine deaminases, evolved adenosine deaminases) provided herein may be from any organism, such as a bacterium. In some embodiments, the deaminase or deaminase domain is a variant of a naturally-occurring deaminase from an organism. In some embodiments, the deaminase or deaminase domain does not occur in nature. For example, in some embodiments, the deaminase or deaminase domain is at least 50%, at least 55%, at least 60%, at least 65%, at least 70%, at least 75% at least 80%, at least 85%, at least 90%, at least 95%, at least 96%, at least 97%, at least 98%, at least 99%, or at least 99.5% identical to a naturally-occurring deaminase. In some embodiments, the adenosine deaminase is from a bacterium, such as, E. coli, S. aureus, S. typhi, S. putrefaciens, H. influenzae, or C. crescentus. In some embodiments, the adenosine deaminase is a TadA deaminase. In some embodiments, the TadA deaminase is an E. coli TadA (ecTadA) deaminase or a fragment thereof.

[0270] For example, the truncated ecTadA may be missing one or more N-terminal amino acids relative to a full-length ecTadA. In some embodiments, the truncated ecTadA may be missing 1, 2, 3, 4, 5, 6, 7, 8, 9, 10, 11, 12, 13, 14, 15, 6, 17, 18, 19, or 20 N-terminal amino acid residues relative to the full length ecTadA. In some embodiments, the truncated ecTadA may be missing 1, 2, 3, 4, 5, 6, 7, 8, 9, 10, 11, 12, 13, 14, 15, 6, 17, 18, 19, or 20 C-terminal amino acid residues relative to the full length ecTadA. In some embodiments, the ecTadA deaminase does not comprise an N-terminal methionine. In some embodiments, the TadA deaminase is an N-terminal truncated TadA. In particular embodiments, the TadA is any one of the TadAs described in PCT/US2017/045381, which is incorporated herein by reference in its entirety.

[0271] In certain embodiments, the adenosine deaminase comprises the amino acid sequence:

MSEVEFSHEYWMRHALTLAKRAWDEREVPVGAVLVHNNRVIGEGWNRPIG
RHDPTAHAEIMALRQGGLVMQNYRLIDATLYVTLEPCVMCAGAMIHSRIG
RVVFGARDAKTGAAGSLMDVLHHPGMNHRVEITEGILADECAALLSDFFR
MRRQEIKAQKKAQSSTD,

which is termed “the TadA reference sequence.”

[0272] In some embodiments the TadA deaminase is a full-length E. coli TadA deaminase. For example, in certain embodiments, the adenosine deaminase comprises the amino acid sequence:

MRRAFITGVFFLSEVEFSHEYWMRHALTLAKRAWDEREVPVGAVLVHNNR
VIGEGWNRPIGRHDPTAHAEIMALRQGGLVMQNYRLIDATLYVTLEPCVM
CAGAMIHSRIGRVVFGARDAKTGAAGSLMDVLHHPGMNHRVEITEGILAD
ECAALLSDFFRMRRQEIKAQKKAQSSTD

[0273] It should be appreciated, however, that additional adenosine deaminases useful in the present application would be apparent to the skilled artisan and are within the scope of this disclosure. For example, the adenosine deaminase may be a homolog of adenosine deaminase acting on tRNA (AD AT). Exemplary AD AT homologs include, without limitation:

Staphylococcus aureus TadA:
MGSHMTNDIYFMTLAIEEAKKAAQLGEVPIGAIITKDDEVIARAHNLRET
LQQPTAHAEHIAIERAAKVLGSWRLEGCTLYVTLEPCVMCAGTIVMSRIP
RVVYGADDPKGGCSGS LMNLLQQS NFNHRAIVDKG VLKE AC S TL
LTTFFKNLRANKKS TN
Bacillus subtilis TadA:
MTQDELYMKEAIKEAKKAEEKGEVPIGAVLVINGEIIARAHNLRETEQRS
IAHAEMLVIDEACKALGTWRLEGATLYVTLEPCPMCAGAVVLSRVEKVVF
GAFDPKGGC SGTLMN LLQEERFNHQAEVVSGVLEEECGGMLSAFFREL
RKKKKAARKNLSE
Salmonella typhimurium (S. typhimurium) TadA:
MPPAFITGVTSLSDVELDHEYWMRHALTLAKRAWDEREVPVGAVLVHNHR
VIGEGWNRPIGRHDPTAHAEIMALRQGGLVLQNYRLLDTTLYVTLEPCVM
CAGAMVHSRIGRVVFGARDAKTGAAGSLIDVLHHPGMNHRVEIIEGVLRD
ECATLLSDFFRMRRQEIKALKKADRAEGAGPAV
Shewanella putrefaciens (S. putrefaciens) TadA:
MDE YWMQVAMQM AEKAEAAGE VPVGA VLVKDGQQIATGYNLS IS
QHDPT AHAEILCLRSAGKKLENYRLLDATLYITLEPCAMCAGAMVHSR
IARVVYGARDEKTGAAGTVVNLLQHPAFNHQVEVTSGVLAEACSAQLSR
FFKRRRDEKKALKLAQRAQQGIE
Haemophilus influenzae F3031 (H. influenzae) TadA:
MDAAKVRSEFDEKMMRYALELADKAEALGEIPVGAVLVDDARNIIGEGWN
LSIVQSDPT AH AEIIALRNG AKNIQN YRLLNS TLY VTLEPCTMC
AG AILHS RIKRLVFG AS DYK TGAIGSRFHFFDDYKMNHTLEITSG
VLAEECSQKLSTFFQKRREEKKIEKALLKSLSDK
Caulobacter crescentus (C. crescentus) TadA:
MRTDESEDQDHRMMRLALDAARAAAEAGETPVGAVILDPSTGEVIATAGN
GPIAAHDPTAHAEIAAMRAAAAKLGNYRLTDLTLVVTLEPCAMCAGAISH
ARIGRVVFGADDPKGGAVVHGPKFFAQPTCHWRPEVTGGVLADESADLLR
GFFRARRKAKI
Geobacter sulfurreducens (G. sulfurreducens) TadA:
MSSLKKTPIRDDAYWMGKAIREAAKAAARDEVPIGAVIVRDGAVIGRGHN
LREGSNDPSAHAEMIAIRQAARRSANWRLTGATLYVTLEPCLMCMGAIIL
ARLERVVFGCYDPKGGAAGSLYDLSADPRLNHQVRLSPGVCQEECGTMLS
DFFRDLRRRKKAKATPALFIDERKVPPEP
TadA7.10
MSEVEFSHEYWMRHALTLAKRARDEREVPVGAVLVLNNRVIGEGWNRAIG
LHDPTAHAEIMALRQGGLVMQNYRLIDATLYVTFEPCVMCAGAMIHSRIG
RVVFGVRNAKTGAAGSLMDVLHYPGMNHRVEITEGILADECAALLCYFFR
MPRQVFNAQKKAQSSTD

[0274] By “agent” is meant any small molecule chemical compound, antibody, nucleic acid molecule, or polypeptide, or fragments thereof.

[0275] By “alteration” is meant a change in the structure, expression levels or activity of a gene or polypeptide as detected by standard art known methods such as those described herein. As used herein, an alteration (e.g., increase or decrease) includes a 10% change in expression levels, a 25% change, a 40% change, and a 50% or greater change in expression levels.

[0276] “Allogeneic,” as used herein, refers to cells of the same species that differ genetically to the cell in comparison.

[0277] By “analog” is meant a molecule that is not identical, but has analogous functional or structural features. For example, a polypeptide analog retains the biological activity of a corresponding naturally-occurring polypeptide, while having certain sequence modifications that enhance the analog's function relative to a naturally occurring polypeptide. Such modifications could increase the analog's protease resistance, membrane permeability, or half-life, without altering, for example, polynucleotide binding activity. In another example, a polynucleotide analog retains the biological activity of a corresponding naturally-occurring polynucleotide while having certain modifications that enhance the analog's function relative to a naturally occurring polynucleotide. Such modifications could increase the polynucleotide's affinity for DNA, half-life, and/or nuclease resistance, an analog may include an unnatural nucleotide or amino acid.

[0278] By “anti-neoplasia activity” is meant preventing or inhibiting the maturation and/or proliferation of neoplasms.

[0279] “Autologous,” as used herein, refers to cells from the same subject.

[0280] By “B cell maturation antigen, or tumor necrosis factor receptor superfamily member 17 polypeptide, (BCMA)” is meant a protein having at least about 85% amino acid sequence identify to NCBI Accession No. NP_001183 or a fragment thereof that is expressed on mature B lymphocytes. An exemplary BCMA polypeptide sequence is provided below.

[0281] >NP_001183.2 tumor necrosis factor receptor superfamily member 17 [Homo sapiens]

MLQMAGQCSQNEYFDSLLHACIPCQLRCSSNTPPLTCQRYCNASVTNSVK
GTNAILWTCLGLSLIISLAVFVLMFLLRKINSEPLKDEFKNTGSGLLGMA
NIDLEKSRTGDEIILPRGLEYTVEECTCEDCIKSKPKVDSDHCFPLPAME
EGATILVTTKTNDYCKSLPAALSATEIEKSISAR

[0282] This antigen can be targeted in relapsed or refractory multiple myeloma and other hematological neoplasia therapies.

[0283] By “B cell maturation antigen, or tumor necrosis factor receptor superfamily member 17, (BCMA) polynucleotide” is meant a nucleic acid molecule encoding a BCMA polypeptide. The BCMA gene encodes a cell surface receptor that recognizes B cell activating factor. An exemplary B2M polynucleotide sequence is provided below.

[0284] >NM_001192.2 Homo sapiens TNF receptor superfamily member 17 (TNFRSF17), mRNA

AAGACTCAAACTTAGAAACTTGAATTAGATGTGGTATTCAAATCCTTAGC
TGCCGCGAAGACACAGACAGCCCCCGTAAGAACCCACGAAGCAGGCGAAG
TTCATTGTTCTCAACATTCTAGCTGCTCTTGCTGCATTTGCTCTGGAATT
CTTGTAGAGATATTACTTGTCCTTCCAGGCTGTTCTTTCTGTAGCTCCCT
TGTTTTCTTTTTGTGATCATGTTGCAGATGGCTGGGCAGTGCTCCCAAAA
TGAATATTTTGACAGTTTGTTGCATGCTTGCATACCTTGTCAACTTCGAT
GTTCTTCTAATACTCCTCCTCTAACATGTCAGCGTTATTGTAATGCAAGT
GTGACCAATTCAGTGAAAGGAACGAATGCGATTCTCTGGACCTGTTTGGG
ACTGAGCTTAATAATTTCTTTGGCAGTTTTCGTGCTAATGTTTTTGCTAA
GGAAGATAAACTCTGAACCATTAAAGGACGAGTTTAAAAACACAGGATCA
GGTCTCCTGGGCATGGCTAACATTGACCTGGAAAAGAGCAGGACTGGTGA
TGAAATTATTCTTCCGAGAGGCCTCGAGTACACGGTGGAAGAATGCACCT
GTGAAGACTGCATCAAGAGCAAACCGAAGGTCGACTCTGACCATTGCTTT
CCACTCCCAGCTATGGAGGAAGGCGCAACCATTCTTGTCACCACGAAAAC
GAATGACTATTGCAAGAGCCTGCCAGCTGCTTTGAGTGCTACGGAGATAG
AGAAATCAATTTCTGCTAGGTAATTAACCATTTCGACTCGAGCAGTGCCA
CTTTAAAAATCTTTTGTCAGAATAGATGATGTGTCAGATCTCTTTAGGAT
GACTGTATTTTTCAGTTGCCGATACAGCTTTTTGTCCTCTAACTGTGGAA
ACTCTTTATGTTAGATATATTTCTCTAGGTTACTGTTGGGAGCTTAATGG
TAGAAACTTCCTTGGTTTCATGATTAAACTCTTTTTTTTCCTGA

[0285] By “base editor (BE),” or “nucleobase editor (NBE)” is meant an agent that binds a polynucleotide and has nucleobase modifying activity. In one embodiment, the agent binds the polynucleotide at a specific sequence using a nucleic acid programmable DNA binding protein. In another embodiment, the base editor is an enzyme capable of modifying a cytidine base within a nucleic acid molecule (e.g., DNA). In some embodiments, the base editor is capable of deaminating a base within a nucleic acid molecule. In some embodiments, the base editor is capable of deaminating a base within a DNA molecule. In some embodiments, the base editor is capable of deaminating a cytidine in DNA. In some embodiments, the base editor is a fusion protein comprising a cytidine deaminase or an adenosine deaminase. In some embodiments, the base editor is a Cas9 protein fused to a cytidine deaminase or an adenosine deaminase. In some embodiments, the base editor is a Cas9 nickase (nCas9) fused to a cytidine deaminase or an adenosine deaminase. In some embodiments, the base editor is fused to an inhibitor of base excision repair, for example, a UGI domain. In some embodiments, the fusion protein comprises a Cas9 nickase fused to a deaminase and an inhibitor of base excision repair, such as a UGI domain. In some embodiments, the cytidine deaminase or an or an adenosine deaminase nucleobase editor polypeptide comprising the following domains A-B:

NH₂-[A-B]—COOH,

[0286] wherein A comprises a cytidine deaminase domain, an adenosine deaminase domain or an active fragment thereof, and wherein B comprises one or more domains having nucleic acid sequence specific binding activity. In one embodiment, the cytidine or adenosine deaminase Nucleobase Editor polypeptide of the previous aspect contains:

NH₂-[Aₙ-Bₒ]—COOH,

[0287] wherein A comprises: a cytidine deaminase domain, an adenosine deaminase domain, or an active fragment thereof, wherein n is an integer: 1, 2, 3, 4, or 5; and wherein B comprises a domain having nucleic acid sequence specific binding activity; and wherein o is an integer: 1, 2, 3, 4, or 5. In one embodiment, the polypeptide contains one or more nuclear localization sequences. In one embodiment, the polypeptide contains at least one of said nuclear localization sequences is at the N-terminus or C-terminus. In one embodiment, the polypeptide contains the nuclear localization signal is a bipartite nuclear localization signal. In one embodiment, the polypeptide contains one or more domains linked by a linker.

[0288] In some embodiments, the base editor is a cytidine base editor (CBE). In some embodiments, the base editor is an adenosine base editor (ABE). In some embodiments, the base editor is an adenosine base editor (ABE) and a cytidine base editor (CBE). In some embodiments, the base editor is a nuclease-inactive Cas9 (dCas9) fused to an adenosine deaminase. In some embodiments, the Cas9 is a circular permutant Cas9 (e.g., spCas9 or saCas9). Circular permutant Cas9s are known in the art and described, for example, in Oakes et al., Cell 176, 254-267, 2019. In some embodiments, the base editor is fused to an inhibitor of base excision repair, for example, a UGI domain, or a dISN domain. In some embodiments, the fusion protein comprises a Cas9 nickase fused to a deaminase and an inhibitor of base excision repair, such as a UGI or dISN domain. In other embodiments the base editor is an abasic base editor.

[0289] In some embodiments, an adenosine deaminase is evolved from TadA. In some embodiments, the polynucleotide programmable DNA binding domain is a CRISPR associated (e.g., Cas or Cpf1) enzyme. In some embodiments, the base editor is a catalytically dead Cas9 (dCas9) fused to a deaminase domain. In some embodiments, the base editor is a Cas9 nickase (nCas9) fused to a deaminase domain. In some embodiments, the base editor is fused to an inhibitor of base excision repair (BER). In some embodiments, the inhibitor of base excision repair is a uracil DNA glycosylase inhibitor (UGI). In some embodiments, the inhibitor of base excision repair is an inosine base excision repair inhibitor. Details of base editors are described in International PCT Application Nos. PCT/2017/045381 (WO2018/027078) and PCT/US2016/058344 (WO2017/070632), each of which is incorporated herein by reference for its entirety. Also see Komor, A. C., et al., “Programmable editing of a target base in genomic DNA without double-stranded DNA cleavage” Nature 533, 420-424 (2016); Gaudelli, N. M., et al., “Programmable base editing of A⋅T to G⋅C in genomic DNA without DNA cleavage” Nature 551, 464-471 (2017); Komor, A. C., et al., “Improved base excision repair inhibition and bacteriophage Mu Gam protein yields C:G-to-T:A base editors with higher efficiency and product purity” Science Advances 3:eaao4774 (2017), and Rees, H. A., et al., “Base editing: precision chemistry on the genome and transcriptome of living cells.” Nat Rev Genet. 2018 December; 19(12):770-788. doi: 10.1038/s41576-018-0059-1, the entire contents of which are hereby incorporated by reference.

[0290] In some embodiments, base editors are generated by cloning an adenosine deaminase variant (e.g., TadA*7.10) into a scaffold that includes a circular permutant Cas9 (e.g., spCAS9) and a bipartite nuclear localization sequence. Circular permutant Cas9s are known in the art and described, for example, in Oakes et al., Cell 176, 254-267, 2019. Exemplary circular permutant sequences are set forth below, in which the bold sequence indicates sequence derived from Cas9, the italics sequence denotes a linker sequence, and the underlined sequence denotes a bipartite nuclear localization sequence.

[0291] CP5 (with MSP “NGC=Pam Variant with mutations Regular Cas9 likes NGG” PID=Protein Interacting Domain and “D10A” nickase):

EIGKATAKYFFYSNIMNFFKTEITLANGEIRKRPLIETNGETGEIVWDKG
RDFATVRKVLSMPQVNIVKKTEVQTGGFSKESILPKRNSDKLIARKKDWD
PKKYGGFMQPTVAYSVLVVAKVEKGKSKKLKSVKELLGITIMERSSFEKN
PIDFLEAKGYKEVKKDLIIKLPKYSLFELENGRKRMLASAKFLQKGNELA
LPSKYVNFLYLASHYEKLKGSPEDNEQKQLFVEQHKHYLDEIIEQISEFS
KRVILADANLDKVLSAYNKHRDKPIREQAENIIHLFTLTNLGAPRAFKYF
DTTIARKEYRSTKEVLDATLIHQSITGLYETRIDLSQLGGDGGSGGSGGS
GGSGGSGGSGGMDKKYSIGLAIGTNSVGWAVITDEYKVPSKKFKVLGNTD
RHSIKKNLIGALLFDSGETAEATRLKRTARRRYTRRKNRICYLQEIFSNE
MAKVDDSFFHRLEESFLVEEDKKHERHPIFGNIVDEVAYHEKYPTIYHLR
KKLVDSTDKADLRLIYLALAHMIKFRGHFLIEGDLNPDNSDVDKLFIQLV
QTYNQLFEENPINASGVDAKAILSARLSKSRRLENLIAQLPGEKKNGLFG
NLIALSLGLTPNFKSNFDLAEDAKLQLSKDTYDDDLDNLLAQIGDQYADL
FLAAKNLSDAILLSDILRVNTEITKAPLSASMIKRYDEHHQDLTLLKALV
RQQLPEKYKEIFFDQSKNGYAGYIDGGASQEEFYKFIKPILEKMDGTEEL
LVKLNREDLLRKQRTFDNGSIPHQIHLGELHAILRRQEDFYPFLKDNREK
IEKILTFRIPYYVGPLARGNSRFAWMTRKSEETITPWNFEEVVDKGASAQ
SFIERMTNFDKNLPNEKVLPKHSLLYEYFTVYNELTKVKYVTEGMRKPAF
LSGEQKKAIVDLLFKTNRKVTVKQLKEDYFKKIECFDSVEISGVEDRFNA
SLGTYHDLLKIIKDKDFLDNEENEDILEDIVLTLTLFEDREMIEERLKTY
AHLFDDKVMKQLKRRRYTGWGRLSRKLINGIRDKQSGKTILDFLKSDGFA
NRNFMQLIHDDSLTFKEDIQKAQVSGQGDSLHEHIANLAGSPAIKKGILQ
TVKVVDELVKVMGRHKPENIVIEMARENQTTQKGQKNSRERMKRIEEGIK
ELGSQILKEHPVENTQLQNEKLYLYYLQNGRDMYVDQELDINRLSDYDVD
HIVPQSFLKDDSIDNKVLTRSDKNRGKSDNVPSEEVVKKMKNYWRQLLNA
KLITQRKFDNLTKAERGGLSELDKAGFIKRQLVETRQITKHVAQILDSRM
NTKYDENDKLIREVKVITLKSKLVSDFRKDFQFYKVREINNYHHAHDAYL
NAVVGTALIKKYPKLESEFVYGDYKVYDVRKMIAKSEQEGADKRTADGSE
FESPKKKRKV*

[0292] The nucleobase components and the polynucleotide programmable nucleotide binding component of a base editor system may be associated with each other covalently or non-covalently. For example, in some embodiments, the deaminase domain can be targeted to a target nucleotide sequence by a polynucleotide programmable nucleotide binding domain. In some embodiments, a polynucleotide programmable nucleotide binding domain can be fused or linked to a deaminase domain. In some embodiments, a polynucleotide programmable nucleotide binding domain can target a deaminase domain to a target nucleotide sequence by non-covalently interacting with or associating with the deaminase domain. For example, in some embodiments, the nucleobase editing component, e.g., the deaminase component can comprise an additional heterologous portion or domain that is capable of interacting with, associating with, or capable of forming a complex with an additional heterologous portion or domain that is part of a polynucleotide programmable nucleotide binding domain. In some embodiments, the additional heterologous portion may be capable of binding to, interacting with, associating with, or forming a complex with a polypeptide. In some embodiments, the additional heterologous portion may be capable of binding to, interacting with, associating with, or forming a complex with a polynucleotide. In some embodiments, the additional heterologous portion may be capable of binding to a guide polynucleotide. In some embodiments, the additional heterologous portion may be capable of binding to a polypeptide linker. In some embodiments, the additional heterologous portion may be capable of binding to a polynucleotide linker. The additional heterologous portion may be a protein domain. In some embodiments, the additional heterologous portion may be a K Homology (KH) domain, a MS2 coat protein domain, a PP7 coat protein domain, a SfMu Com coat protein domain, a steril alpha motif, a telomerase Ku binding motif and Ku protein, a telomerase Sm7 binding motif and Sm7 protein, or a RNA recognition motif.

[0293] A base editor system may further comprise a guide polynucleotide component. It should be appreciated that components of the base editor system may be associated with each other via covalent bonds, noncovalent interactions, or any combination of associations and interactions thereof. In some embodiments, a deaminase domain can be targeted to a target nucleotide sequence by a guide polynucleotide. For example, in some embodiments, the nucleobase editing component of the base editor system, e.g., the deaminase component, can comprise an additional heterologous portion or domain (e.g., polynucleotide binding domain such as an RNA or DNA binding protein) that is capable of interacting with, associating with, or capable of forming a complex with a portion or segment (e.g., a polynucleotide motif) of a guide polynucleotide. In some embodiments, the additional heterologous portion or domain (e.g., polynucleotide binding domain such as an RNA or DNA binding protein) can be fused or linked to the deaminase domain. In some embodiments, the additional heterologous portion may be capable of binding to, interacting with, associating with, or forming a complex with a polypeptide. In some embodiments, the additional heterologous portion may be capable of binding to, interacting with, associating with, or forming a complex with a polynucleotide. In some embodiments, the additional heterologous portion may be capable of binding to a guide polynucleotide. In some embodiments, the additional heterologous portion may be capable of binding to a polypeptide linker. In some embodiments, the additional heterologous portion may be capable of binding to a polynucleotide linker. The additional heterologous portion may be a protein domain. In some embodiments, the additional heterologous portion may be a K Homology (KH) domain, a MS2 coat protein domain, a PP7 coat protein domain, a SfMu Com coat protein domain, a sterile alpha motif, a telomerase Ku binding motif and Ku protein, a telomerase Sm7 binding motif and Sm7 protein, or a RNA recognition motif.

[0294] In some embodiments, a base editor system can further comprise an inhibitor of base excision repair (BER) component. It should be appreciated that components of the base editor system may be associated with each other via covalent bonds, noncovalent interactions, or any combination of associations and interactions thereof. The inhibitor of BER component may comprise a base excision repair inhibitor. In some embodiments, the inhibitor of base excision repair can be a uracil DNA glycosylase inhibitor (UGI). In some embodiments, the inhibitor of base excision repair can be an inosine base excision repair inhibitor. In some embodiments, the inhibitor of base excision repair can be targeted to the target nucleotide sequence by the polynucleotide programmable nucleotide binding domain. In some embodiments, a polynucleotide programmable nucleotide binding domain can be fused or linked to an inhibitor of base excision repair. In some embodiments, a polynucleotide programmable nucleotide binding domain can be fused or linked to a deaminase domain and an inhibitor of base excision repair. In some embodiments, a polynucleotide programmable nucleotide binding domain can target an inhibitor of base excision repair to a target nucleotide sequence by non-covalently interacting with or associating with the inhibitor of base excision repair. For example, in some embodiments, the inhibitor of base excision repair component can comprise an additional heterologous portion or domain that is capable of interacting with, associating with, or capable of forming a complex with an additional heterologous portion or domain that is part of a polynucleotide programmable nucleotide binding domain. In some embodiments, the inhibitor of base excision repair can be targeted to the target nucleotide sequence by the guide polynucleotide. For example, in some embodiments, the inhibitor of base excision repair can comprise an additional heterologous portion or domain (e.g., polynucleotide binding domain such as an RNA or DNA binding protein) that is capable of interacting with, associating with, or capable of forming a complex with a portion or segment (e.g., a polynucleotide motif) of a guide polynucleotide. In some embodiments, the additional heterologous portion or domain of the guide polynucleotide (e.g., polynucleotide binding domain such as an RNA or DNA binding protein) can be fused or linked to the inhibitor of base excision repair. In some embodiments, the additional heterologous portion may be capable of binding to, interacting with, associating with, or forming a complex with a polynucleotide. In some embodiments, the additional heterologous portion may be capable of binding to a guide polynucleotide. In some embodiments, the additional heterologous portion may be capable of binding to a polypeptide linker. In some embodiments, the additional heterologous portion may be capable of binding to a polynucleotide linker. The additional heterologous portion may be a protein domain. In some embodiments, the additional heterologous portion may be a K Homology (KH) domain, a MS2 coat protein domain, a PP7 coat protein domain, a SfMu Com coat protein domain, a sterile alpha motif, a telomerase Ku binding motif and Ku protein, a telomerase Sm7 binding motif and Sm7 protein, or a RNA recognition motif. By “base editing activity” is meant acting to chemically alter a base within a polynucleotide. In one embodiment, a first base is converted to a second base. In one embodiment, the base editing activity is cytidine deaminase activity, e.g., converting target C⋅G to T⋅A. In another embodiment, the base editing activity is adenosine deaminase activity, e.g., converting A⋅T to G⋅C.

[0295] By “beta-2 microglobulin (B2M) polypeptide” is meant a protein having at least about 85% amino acid sequence identity to UniProt Accession No. P61769 or a fragment thereof and having immunomodulatory activity. An exemplary B2M polypeptide sequence is provided below.

>sp|P61769|B2MG_HUMAN Beta-2-microglobulin OS═Homo sapiens OX=9606 GN=B2M PE=1 SV=1

MSRSVALAVLALLSLSGLEAIQRTPKIQVYSRHPAENGKSNFLNCYVSGF
HPSDIEVDLLKNGERIEKVEHSDLSFSKDWSFYLLYYTEFTPTEKDEYAC
RVNHVTLSQPKIVKWDRDM

[0296] By “beta-2-microglobulin (B2M) polynucleotide” is meant a nucleic acid molecule encoding a B2M polypeptide. The beta-2-microglobulin gene encodes a serum protein associated with the major histocompatibility complex. B2M is involved in non-self recognition by host CD8+ T cells. An exemplary B2M polynucleotide sequence is provided below.

>DQ217933.1 Homo sapiens beta-2-microglobin
(B2M) gene, complete cds
CATGTCATAAATGGTAAGTCCAAGAAAAATACAGGTATTCCCCCCCAAAG
AAAACTGTAAAATCGACTTTTTTCTATCTGTACTGTTTTTTATTGGTTTT
TAAATTGGTTTTCCAAGTGAGTAAATCAGAATCTATCTGTAATGGATTTT
AAATTTAGTGTTTCTCTGTGATGTAGTAAACAAGAAACTAGAGGCAAAAA
TAGCCCTGTCCCTTGCTAAACTTCTAAGGCACTTTTCTAGTACAACTCAA
CACTAACATTTCAGGCCTTTAGTGCCTTATATGAGTTTTTAAAAGGGGGA
AAAGGGAGGGAGCAAGAGTGTCTTAACTCATACATTTAGGCATAACAATT
ATTCTCATATTTTAGTTATTGAGAGGGCTGGTAGAAAAACTAGGTAAATA
ATATTAATAATTATAGCGCTTATTAAACACTACAGAACACTTACTATGTA
CCAGGCATTGTGGGAGGCTCTCTCTTGTGCATTATCTCATTTCATTAGGT
CCATGGAGAGTATTGCATTTTCTTAGTTTAGGCATGGCCTCCACAATAAA
GATTATCAAAAGCCTAAAAATATGTAAAAGAAACCTAGAAGTTATTTGTT
GTGCTCCTTGGGGAAGCTAGGCAAATCCTTTCAACTGAAAACCATGGTGA
CTTCCAAGATCTCTGCCCCTCCCCATCGCCATGGTCCACTTCCTCTTCTC
ACTGTTCCTCTTAGAAAAGATCTGTGGACTCCACCACCACGAAATGGCGG
CACCTTATTTATGGTCACTTTAGAGGGTAGGTTTTCTTAATGGGTCTGCC
TGTCATGTTTAACGTCCTTGGCTGGGTCCAAGGCAGATGCAGTCCAAACT
CTCACTAAAATTGCCGAGCCCTTTGTCTTCCAGTGTCTAAAATATTAATG
TCAATGGAATCAGGCCAGAGTTTGAATTCTAGTCTCTTAGCCTTTGTTTC
CCCTGTCCATAAAATGAATGGGGGTAATTCTTTCCTCCTACAGTTTATTT
ATATATTCACTAATTCATTCATTCATCCATCCATTCGTTCATTCGGTTTA
CTGAGTACCTACTATGTGCCAGCCCCTGTTCTAGGGTGGAAACTAAGAGA
ATGATGTACCTAGAGGGCGCTGGAAGCTCTAAAGCCCTAGCAGTTACTGC
TTTTACTATTAGTGGTCGTTTTTTTCTCCCCCCCGCCCCCCGACAAATCA
ACAGAACAAAGAAAATTACCTAAACAGCAAGGACATAGGGAGGAACTTCT
TGGCACAGAACTTTCCAAACACTTTTTCCTGAAGGGATACAAGAAGCAAG
AAAGGTACTCTTTCACTAGGACCTTCTCTGAGCTGTCCTCAGGATGCTTT
TGGGACTATTTTTCTTACCCAGAGAATGGAGAAACCCTGCAGGGAATTCC
CAAGCTGTAGTTATAAACAGAAGTTCTCCTTCTGCTAGGTAGCATTCAAA
GATCTTAATCTTCTGGGTTTCCGTTTTCTCGAATGAAAAATGCAGGTCCG
AGCAGTTAACTGGCTGGGGCACCATTAGCAAGTCACTTAGCATCTCTGGG
GCCAGTCTGCAAAGCGAGGGGGCAGCCTTAATGTGCCTCCAGCCTGAAGT
CCTAGAATGAGCGCCCGGTGTCCCAAGCTGGGGCGCGCACCCCAGATCGG
AGGGCGCCGATGTACAGACAGCAAACTCACCCAGTCTAGTGCATGCCTTC
TTAAACATCACGAGACTCTAAGAAAAGGAAACTGAAAACGGGAAAGTCCC
TCTCTCTAACCTGGCACTGCGTCGCTGGCTTGGAGACAGGTGACGGTCCC
TGCGGGCCTTGTCCTGATTGGCTGGGCACGCGTTTAATATAAGTGGAGGC
GTCGCGCTGGCGGGCATTCCTGAAGCTGACAGCATTCGGGCCGAGATGTC
TCGCTCCGTGGCCTTAGCTGTGCTCGCGCTACTCTCTCTTTCTGGCCTGG
AGGCTATCCAGCGTGAGTCTCTCCTACCCTCCCGCTCTGGTCCTTCCTCT
CCCGCTCTGCACCCTCTGTGGCCCTCGCTGTGCTCTCTCGCTCCGTGACT
TCCCTTCTCCAAGTTCTCCTTGGTGGCCCGCCGTGGGGCTAGTCCAGGGC
TGGATCTCGGGGAAGCGGCGGGGTGGCCTGGGAGTGGGGAAGGGGGTGCG
CACCCGGGACGCGCGCTACTTGCCCCTTTCGGCGGGGAGCAGGGGAGACC
TTTGGCCTACGGCGACGGGAGGGTCGGGACAAAGTTTAGGGCGTCGATAA
GCGTCAGAGCGCCGAGGTTGGGGGAGGGTTTCTCTTCCGCTCTTTCGCGG
GGCCTCTGGCTCCCCCAGCGCAGCTGGAGTGGGGGACGGGTAGGCTCGTC
CCAAAGGCGCGGCGCTGAGGTTTGTGAACGCGTGGAGGGGCGCTTGGGGT
CTGGGGGAGGCGTCGCCCGGGTAAGCCTGTCTGCTGCGGCTCTGCTTCCC
TTAGACTGGAGAGCTGTGGACTTCGTCTAGGCGCCCGCTAAGTTCGCATG
TCCTAGCACCTCTGGGTCTATGTGGGGCCACACCGTGGGGAGGAAACAGC
ACGCGACGTTTGTAGAATGCTTGGCTGTGATACAAAGCGGTTTCGAATAA
TTAACTTATTTGTTCCCATCACATGTCACTTTTAAAAAATTATAAGAACT
ACCCGTTATTGACATCTTTCTGTGTGCCAAGGACTTTATGTGCTTTGCGT
CATTTAATTTTGAAAACAGTTATCTTCCGCCATAGATAACTACTATGGTT
ATCTTCTGCCTCTCACAGATGAAGAAACTAAGGCACCGAGATTTTAAGAA
ACTTAATTACACAGGGGATAAATGGCAGCAATCGAGATTGAAGTCAAGCC
TAACCAGGGCTTTTGCGGGAGCGCATGCCTTTTGGCTGTAATTCGTGCAT
TTTTTTTTAAGAAAAACGCCTGCCTTCTGCGTGAGATTCTCCAGAGCAAA
CTGGGCGGCATGGGCCCTGTGGTCTTTTCGTACAGAGGGCTTCCTCTTTG
GCTCTTTGCCTGGTTGTTTCCAAGATGTACTGTGCCTCTTACTTTCGGTT
TTGAAAACATGAGGGGGTTGGGCGTGGTAGCTTACGCCTGTAATCCCAGC
ACTTAGGGAGGCCGAGGCGGGAGGATGGCTTGAGGTCCGTAGTTGAGACC
AGCCTGGCCAACATGGTGAAGCCTGGTCTCTACAAAAAATAATAACAAAA
ATTAGCCGGGTGTGGTGGCTCGTGCCTGTGGTCCCAGCTGCTCCGGTGGC
TGAGGCGGGAGGATCTCTTGAGCTTAGGCTTTTGAGCTATCATGGCGCCA
GTGCACTCCAGCGTGGGCAACAGAGCGAGACCCTGTCTCTCAAAAAAGAA
AAAAAAAAAAAAAGAAAGAGAAAAGAAAAGAAAGAAAGAAGTGAAGGTTT
GTCAGTCAGGGGAGCTGTAAAACCATTAATAAAGATAATCCAAGATGGTT
ACCAAGACTGTTGAGGACGCCAGAGATCTTGAGCACTTTCTAAGTACCTG
GCAATACACTAAGCGCGCTCACCTTTTCCTCTGGCAAAACATGATCGAAA
GCAGAATGTTTTGATCATGAGAAAATTGCATTTAATTTGAATACAATTTA
TTTACAACATAAAGGATAATGTATATATCACCACCATTACTGGTATTTGC
TGGTTATGTTAGATGTCATTTTAAAAAATAACAATCTGATATTTAAAAAA
AAATCTTATTTTGAAAATTTCCAAAGTAATACATGCCATGCATAGACCAT
TTCTGGAAGATACCACAAGAAACATGTAATGATGATTGCCTCTGAAGGTC
TATTTTCCTCCTCTGACCTGTGTGTGGGTTTTGTTTTTGTTTTACTGTGG
GCATAAATTAATTTTTCAGTTAAGTTTTGGAAGCTTAAATAACTCTCCAA
AAGTCATAAAGCCAGTAACTGGTTGAGCCCAAATTCAAACCCAGCCTGTC
TGATACTTGTCCTCTTCTTAGAAAAGATTACAGTGATGCTCTCACAAAAT
CTTGCCGCCTTCCCTCAAACAGAGAGTTCCAGGCAGGATGAATCTGTGCT
CTGATCCCTGAGGCATTTAATATGTTCTTATTATTAGAAGCTCAGATGCA
AAGAGCTCTCTTAGCTTTTAATGTTATGAAAAAAATCAGGTCTTCATTAG
ATTCCCCAATCCACCTCTTGATGGGGCTAGTAGCCTTTCCTTAATGATAG
GGTGTTTCTAGAGAGATATATCTGGTCAAGGTGGCCTGGTACTCCTCCTT
CTCCCCACAGCCTCCCAGACAAGGAGGAGTAGCTGCCTTTTAGTGATCAT
GTACCCTGAATATAAGTGTATTTAAAAGAATTTTATACACATATATTTAG
TGTCAATCTGTATATTTAGTAGCACTAACACTTCTCTTCATTTTCAATGA
AAAATATAGAGTTTATAATATTTTCTTCCCACTTCCCCATGGATGGTCTA
GTCATGCCTCTCATTTTGGAAAGTACTGTTTCTGAAACATTAGGCAATAT
ATTCCCAACCTGGCTAGTTTACAGCAATCACCTGTGGATGCTAATTAAAA
CGCAAATCCCACTGTCACATGCATTACTCCATTTGATCATAATGGAAAGT
ATGTTCTGTCCCATTTGCCATAGTCCTCACCTATCCCTGTTGTATTTTAT
CGGGTCCAACTCAACCATTTAAGGTATTTGCCAGCTCTTGTATGCATTTA
GGTTTTGTTTCTTTGTTTTTTAGCTCATGAAATTAGGTACAAAGTCAGAG
AGGGGTCTGGCATATAAAACCTCAGCAGAAATAAAGAGGTTTTGTTGTTT
GGTAAGAACATACCTTGGGTTGGTTGGGCACGGTGGCTCGTGCCTGTAAT
CCCAACACTTTGGGAGGCCAAGGCAGGCTGATCACTTGAAGTTGGGAGTT
CAAGACCAGCCTGGCCAACATGGTGAAATCCCGTCTCTACTGAAAATACA
AAAATTAACCAGGCATGGTGGTGTGTGCCTGTAGTCCCAGGAATCACTTG
AACCCAGGAGGCGGAGGTTGCAGTGAGCTGAGATCTCACCACTGCACACT
GCACTCCAGCCTGGGCAATGGAATGAGATTCCATCCCAAAAAATAAAAAA
ATAAAAAAATAAAGAACATACCTTGGGTTGATCCACTTAGGAACCTCAGA
TAATAACATCTGCCACGTATAGAGCAATTGCTATGTCCCAGGCACTCTAC
TAGACACTTCATACAGTTTAGAAAATCAGATGGGTGTAGATCAAGGCAGG
AGCAGGAACCAAAAAGAAAGGCATAAACATAAGAAAAAAAATGGAAGGGG
TGGAAACAGAGTACAATAACATGAGTAATTTGATGGGGGCTATTATGAAC
TGAGAAATGAACTTTGAAAAGTATCTTGGGGCCAAATCATGTAGACTCTT
GAGTGATGTGTTAAGGAATGCTATGAGTGCTGAGAGGGCATCAGAAGTCC
TTGAGAGCCTCCAGAGAAAGGCTCTTAAAAATGCAGCGCAATCTCCAGTG
ACAGAAGATACTGCTAGAAATCTGCTAGAAAAAAAACAAAAAAGGCATGT
ATAGAGGAATTATGAGGGAAAGATACCAAGTCACGGTTTATTCTTCAAAA
TGGAGGTGGCTTGTTGGGAAGGTGGAAGCTCATTTGGCCAGAGTGGAAAT
GGAATTGGGAGAAATCGATGACCAAATGTAAACACTTGGTGCCTGATATA
GCTTGACACCAAGTTAGCCCCAAGTGAAATACCCTGGCAATATTAATGTG
TCTTTTCCCGATATTCCTCAGGTACTCCAAAGATTCAGGTTTACTCACGT
CATCCAGCAGAGAATGGAAAGTCAAATTTCCTGAATTGCTATGTGTCTGG
GTTTCATCCATCCGACATTGAAGTTGACTTACTGAAGAATGGAGAGAGAA
TTGAAAAAGTGGAGCATTCAGACTTGTCTTTCAGCAAGGACTGGTCTTTC
TATCTCTTGTACTACACTGAATTCACCCCCACTGAAAAAGATGAGTATGC
CTGCCGTGTGAACCATGTGACTTTGTCACAGCCCAAGATAGTTAAGTGGG
GTAAGTCTTACATTCTTTTGTAAGCTGCTGAAAGTTGTGTATGAGTAGTC
ATATCATAAAGCTGCTTTGATATAAAAAAGGTCTATGGCCATACTACCCT
GAATGAGTCCCATCCCATCTGATATAAACAATCTGCATATTGGGATTGTC
AGGGAATGTTCTTAAAGATCAGATTAGTGGCACCTGCTGAGATACTGATG
CACAGCATGGTTTCTGAACCAGTAGTTTCCCTGCAGTTGAGCAGGGAGCA
GCAGCAGCACTTGCACAAATACATATACACTCTTAACACTTCTTACCTAC
TGGCTTCCTCTAGCTTTTGTGGCAGCTTCAGGTATATTTAGCACTGAACG
AACATCTCAAGAAGGTATAGGCCTTTGTTTGTAAGTCCTGCTGTCCTAGC
ATCCTATAATCCTGGACTTCTCCAGTACTTTCTGGCTGGATTGGTATCTG
AGGCTAGTAGGAAGGGCTTGTTCCTGCTGGGTAGCTCTAAACAATGTATT
CATGGGTAGGAACAGCAGCCTATTCTGCCAGCCTTATTTCTAACCATTTT
AGACATTTGTTAGTACATGGTATTTTAAAAGTAAAACTTAATGTCTTCCT
TTTTTTTCTCCACTGTCTTTTTCATAGATCGAGACATGTAAGCAGCATCA
TGGAGGTAAGTTTTTGACCTTGAGAAAATGTTTTTGTTTCACTGTCCTGA
GGACTATTTATAGACAGCTCTAACATGATAACCCTCACTATGTGGAGAAC
ATTGACAGAGTAACATTTTAGCAGGGAAAGAAGAATCCTACAGGGTCATG
TTCCCTTCTCCTGTGGAGTGGCATGAAGAAGGTGTATGGCCCCAGGTATG
GCCATATTACTGACCCTCTACAGAGAGGGCAAAGGAACTGCCAGTATGGT
ATTGCAGGATAAAGGCAGGTGGTTACCCACATTACCTGCAAGGCTTTGAT
CTTTCTTCTGCCATTTCCACATTGGACATCTCTGCTGAGGAGAGAAAATG
AACCACTCTTTTCCTTTGTATAATGTTGTTTTATTCTTCAGACAGAAGAG
AGGAGTTATACAGCTCTGCAGACATCCCATTCCTGTATGGGGACTGTGTT
TGCCTCTTAGAGGTTCCCAGGCCACTAGAGGAGATAAAGGGAAACAGATT
GTTATAACTTGATATAATGATACTATAATAGATGTAACTACAAGGAGCTC
CAGAAGCAAGAGAGAGGGAGGAACTTGGACTTCTCTGCATCTTTAGTTGG
AGTCCAAAGGCTTTTCAATGAAATTCTACTGCCCAGGGTACATTGATGCT
GAAACCCCATTCAAATCTCCTGTTATATTCTAGAACAGGGAATTGATTTG
GGAGAGCATCAGGAAGGTGGATGATCTGCCCAGTCACACTGTTAGTAAAT
TGTAGAGCCAGGACCTGAACTCTAATATAGTCATGTGTTACTTAATGACG
GGGACATGTTCTGAGAAATGCTTACACAAACCTAGGTGTTGTAGCCTACT
ACACGCATAGGCTACATGGTATAGCCTATTGCTCCTAGACTACAAACCTG
TACAGCCTGTTACTGTACTGAATACTGTGGGCAGTTGTAACACAATGGTA
AGTATTTGTGTATCTAAACATAGAAGTTGCAGTAAAAATATGCTATTTTA
ATCTTATGAGACCACTGTCATATATACAGTCCATCATTGACCAAAACATC
ATATCAGCATTTTTTCTTCTAAGATTTTGGGAGCACCAAAGGGATACACT
AACAGGATATACTCTTTATAATGGGTTTGGAGAACTGTCTGCAGCTACTT
CTTTTAAAAAGGTGATCTACACAGTAGAAATTAGACAAGTTTGGTAATGA
GATCTGCAATCCAAATAAAATAAATTCATTGCTAACCTTTTTCTTTTCTT
TTCAGGTTTGAAGATGCCGCATTTGGATTGGATGAATTCCAAATTCTGCT
TGCTTGCTTTTTAATATTGATATGCTTATACACTTACACTTTATGCACAA
AATGTAGGGTTATAATAATGTTAACATGGACATGATCTTCTTTATAATTC
TACTTTGAGTGCTGTCTCCATGTTTGATGTATCTGAGCAGGTTGCTCCAC
AGGTAGCTCTAGGAGGGCTGGCAACTTAGAGGTGGGGAGCAGAGAATTCT
CTTATCCAACATCAACATCTTGGTCAGATTTGAACTCTTCAATCTCTTGC
ACTCAAAGCTTGTTAAGATAGTTAAGCGTGCATAAGTTAACTTCCAATTT
ACATACTCTGCTTAGAATTTGGGGGAAAATTTAGAAATATAATTGACAGG
ATTATTGGAAATTTGTTATAATGAATGAAACATTTTGTCATATAAGATTC
ATATTTACTTCTTATACATTTGATAAAGTAAGGCATGGTTGTGGTTAATC
TGGTTTATTTTTGTTCCACAAGTTAAATAAATCATAAAACTTGATGTGTT
ATCTCTTATATCTCACTCCCACTATTACCCCTTTATTTTCAAACAGGGAA
ACAGTCTTCAAGTTCCACTTGGTAAAAAATGTGAACCCCTTGTATATAGA
GTTTGGCTCACAGTGTAAAGGGCCTCAGTGATTCACATTTTCCAGATTAG
GAATCTGATGCTCAAAGAAGTTAAATGGCATAGTTGGGGTGACACAGCTG
TCTAGTGGGAGGCCAGCCTTCTATATTTTAGCCAGCGTTCTTTCCTGCGG
GCCAGGTCATGAGGAGTATGCAGACTCTAAGAGGGAGCAAAAGTATCTGA
AGGATTTAATATTTTAGCAAGGAATAGATATACAATCATCCCTTGGTCTC
CCTGGGGGATTGGTTTCAGGACCCCTTCTTGGACACCAAATCTATGGATA
TTTAAGTCCCTTCTATAAAATGGTATAGTATTTGCATATAACCTATCCAC
ATCCTCCTGTATACTTTAAATCATTTCTAGATTACTTGTAATACCTAATA
CAATGTAAATGCTATGCAAATAGTTGTTATTGTTTAAGGAATAATGACAA
GAAAAAAAAGTCTGTACATGCTCAGTAAAGACACAACCATCCCTTTTTTT
CCCCAGTGTTTTTGATCCATGGTTTGCTGAATCCACAGATGTGGAGCCCC
TGGATACGGAAGGCCCGCTGTACTTTGAATGACAAATAACAGATTTAAA

[0297] The term “Cas9” or “Cas9 domain” refers to an RNA-guided nuclease comprising a Cas9 protein, or a fragment thereof (e.g., a protein comprising an active, inactive, or partially active DNA cleavage domain of Cas9, and/or the gRNA binding domain of Cas9). A Cas9 nuclease is also referred to sometimes as a casn1 nuclease or a CRISPR (“clustered regularly interspaced short palindromic repeat”)-associated nuclease. CRISPR is an adaptive immune system that provides protection against mobile genetic elements (viruses, transposable elements and conjugative plasmids). CRISPR clusters contain spacers, sequences complementary to antecedent mobile elements, and target invading nucleic acids. CRISPR clusters are transcribed and processed into CRISPR RNA (crRNA). In type II CRISPR systems correct processing of pre-crRNA requires a trans-encoded small RNA (tracrRNA), endogenous ribonuclease 3 (mc) and a Cas9 protein. The tracrRNA serves as a guide for ribonuclease 3-aided processing of pre-crRNA. Subsequently, Cas9/crRNA/tracrRNA endonucleolytically cleaves linear or circular dsDNA target complementary to the spacer. The target strand not complementary to crRNA is first cut endonucleolytically, then trimmed 3′-5′ exonucleolytically. In nature, DNA-binding and cleavage typically requires protein and both RNAs. However, single guide RNAs (“sgRNA”, or simply “gNRA”) can be engineered so as to incorporate aspects of both the crRNA and tracrRNA into a single RNA species. See, e.g., Jinek M., Chylinski K., Fonfara I., Hauer M., Doudna J. A., Charpentier E. Science 337:816-821(2012), the entire contents of which is hereby incorporated by reference. Cas9 recognizes a short motif in the CRISPR repeat sequences (the PAM or protospacer adjacent motif) to help distinguish self versus non-self. Cas9 nuclease sequences and structures are well known to those of skill in the art (see, e.g., “Complete genome sequence of an M1 strain of Streptococcus pyogenes.” Ferretti et al., J. J., McShan W. M., Ajdic D. J., Savic D. J., Savic G., Lyon K., Primeaux C., Sezate S., Suvorov A. N., Kenton S., Lai H. S., Lin S. P., Qian Y., Jia H. G., Najar F. Z., Ren Q., Zhu H., Song L., White J., Yuan X., Clifton S. W., Roe B. A., McLaughlin R. E., Proc. Natl. Acad. Sci. U.S.A. 98:4658-4663(2001); “CRISPR RNA maturation by trans-encoded small RNA and host factor RNase III.” Deltcheva E., Chylinski K., Sharma C. M., Gonzales K., Chao Y., Pirzada Z. A., Eckert M. R., Vogel J., Charpentier E., Nature 471:602-607(2011); and “A programmable dual-RNA-guided DNA endonuclease in adaptive bacterial immunity.” Jinek M., Chylinski K., Fonfara I., Hauer M., Doudna J. A., Charpentier E. Science 337:816-821(2012), the entire contents of each of which are incorporated herein by reference). Cas9 orthologs have been described in various species, including, but not limited to, S. pyogenes and S. thermophilus. Additional suitable Cas9 nucleases and sequences will be apparent to those of skill in the art based on this disclosure, and such Cas9 nucleases and sequences include Cas9 sequences from the organisms and loci disclosed in Chylinski, Rhun, and Charpentier, “The tracrRNA and Cas9 families of type II CRISPR-Cas immunity systems” (2013) RNA Biology 10:5, 726-737; the entire contents of which are incorporated herein by reference. In some embodiments, a Cas9 nuclease has an inactive (e.g., an inactivated) DNA cleavage domain, that is, the Cas9 is a nickase.

[0298] A nuclease-inactivated Cas9 protein may interchangeably be referred to as a “dCas9” protein (for nuclease-“dead” Cas9). Methods for generating a Cas9 protein (or a fragment thereof) having an inactive DNA cleavage domain are known (See, e.g., Jinek et al., Science. 337:816-821(2012); Qi et al., “Repurposing CRISPR as an RNA-Guided Platform for Sequence-Specific Control of Gene Expression” (2013) Cell. 28; 152(5):1173-83, the entire contents of each of which are incorporated herein by reference). For example, the DNA cleavage domain of Cas9 is known to include two subdomains, the HNH nuclease subdomain and the RuvC1 subdomain. The HNH subdomain cleaves the strand complementary to the gRNA, whereas the RuvC1 subdomain cleaves the non-complementary strand. Mutations within these subdomains can silence the nuclease activity of Cas9. For example, the mutations D10A and H840A completely inactivate the nuclease activity of S. pyogenes Cas9 (Jinek et al., Science. 337:816-821(2012); Qi et al., Cell. 28; 152(5):1173-83 (2013)). In some embodiments, proteins comprising fragments of Cas9 are provided. For example, in some embodiments, a protein comprises one of two Cas9 domains: (1) the gRNA binding domain of Cas9; or (2) the DNA cleavage domain of Cas9. In some embodiments, proteins comprising Cas9 or fragments thereof are referred to as “Cas9 variants.” A Cas9 variant shares homology to Cas9, or a fragment thereof. For example, a Cas9 variant is at least about 70% identical, at least about 80% identical, at least about 90% identical, at least about 95% identical, at least about 96% identical, at least about 97% identical, at least about 98% identical, at least about 99% identical, at least about 99.5% identical, or at least about 99.9% identical to wild type Cas9. In some embodiments, the Cas9 variant may have 1, 2, 3, 4, 5, 6, 7, 8, 9, 10, 11, 12, 13, 14, 15, 16, 17, 18, 19, 20, 21, 22, 21, 24, 25, 26, 27, 28, 29, 30, 31, 32, 33, 34, 35, 36, 37, 38, 39, 40, 41, 42, 43, 44, 45, 46, 47, 48, 49, 50 or more amino acid changes compared to wild type Cas9. In some embodiments, the Cas9 variant comprises a fragment of Cas9 (e.g., a gRNA binding domain or a DNA-cleavage domain), such that the fragment is at least about 70% identical, at least about 80% identical, at least about 90% identical, at least about 95% identical, at least about 96% identical, at least about 97% identical, at least about 98% identical, at least about 99% identical, at least about 99.5% identical, or at least about 99.9% identical to the corresponding fragment of wild type Cas9. In some embodiments, the fragment is at least 30%, at least 35%, at least 40%, at least 45%, at least 50%, at least 55%, at least 60%, at least 65%, at least 70%, at least 75%, at least 80%, at least 85%, at least 90%, at least 95% identical, at least 96%, at least 97%, at least 98%, at least 99%, or at least 99.5% of the amino acid length of a corresponding wild type Cas9.

[0299] In some embodiments, the fragment is at least 100 amino acids in length. In some embodiments, the fragment is at least 100, 150, 200, 250, 300, 350, 400, 450, 500, 550, 600, 650, 700, 750, 800, 850, 900, 950, 1000, 1050, 1100, 1150, 1200, 1250, or at least 1300 amino acids in length. In some embodiments, wild type Cas9 corresponds to Cas9 from Streptococcus pyogenes (NCBI Reference Sequence: NC_017053.1, nucleotide and amino acid sequences as follows).

ATGGATAAGAAATACTCAATAGGCTTAGATATCGGCACAAATAGCGTCGGATGGGC
GGTGATCACTGATGATTATAAGGTTCCGTCTAAAAAGTTCAAGGTTCTGGGAAATAC
AGACCGCCACAGTATCAAAAAAAATCTTATAGGGGCTCTTTTATTTGGCAGTGGAGA
GACAGCGGAAGCGACTCGTCTCAAACGGACAGCTCGTAGAAGGTATACACGTCGGA
AGAATCGTATTTGTTATCTACAGGAGATTTTTTCAAATGAGATGGCGAAAGTAGATG
ATAGTTTCTTTCATCGACTTGAAGAGTCTTTTTTGGTGGAAGAAGACAAGAAGCATG
AACGTCATCCTATTTTTGGAAATATAGTAGATGAAGTTGCTTATCATGAGAAATATC
CAACTATCTATCATCTGCGAAAAAAATTGGCAGATTCTACTGATAAAGCGGATTTGC
GCTTAATCTATTTGGCCTTAGCGCATATGATTAAGTTTCGTGGTCATTTTTTGATTGA
GGGAGATTTAAATCCTGATAATAGTGATGTGGACAAACTATTTATCCAGTTGGTACA
AATCTACAATCAATTATTTGAAGAAAACCCTATTAACGCAAGTAGAGTAGATGCTAA
AGCGATTCTTTCTGCACGATTGAGTAAATCAAGACGATTAGAAAATCTCATTGCTCA
GCTCCCCGGTGAGAAGAGAAATGGCTTGTTTGGGAATCTCATTGCTTTGTCATTGGG
ATTGACCCCTAATTTTAAATCAAATTTTGATTTGGCAGAAGATGCTAAATTACAGCT
TTCAAAAGATACTTACGATGATGATTTAGATAATTTATTGGCGCAAATTGGAGATCA
ATATGCTGATTTGTTTTTGGCAGCTAAGAATTTATCAGATGCTATTTTACTTTCAGAT
ATCCTAAGAGTAAATAGTGAAATAACTAAGGCTCCCCTATCAGCTTCAATGATTAAG
CGCTACGATGAACATCATCAAGACTTGACTCTTTTAAAAGCTTTAGTTCGACAACAA
CTTCCAGAAAAGTATAAAGAAATCTTTTTTGATCAATCAAAAAACGGATATGCAGGT
TATATTGATGGGGGAGCTAGCCAAGAAGAATTTTATAAATTTATCAAACCAATTTTA
GAAAAAATGGATGGTACTGAGGAATTATTGGTGAAACTAAATCGTGAAGATTTGCT
GCGCAAGCAACGGACCTTTGACAACGGCTCTATTCCCCATCAAATTCACTTGGGTGA
GCTGCATGCTATTTTGAGAAGACAAGAAGACTTTTATCCATTTTTAAAAGACAATCG
TGAGAAGATTGAAAAAATCTTGACTTTTCGAATTCCTTATTATGTTGGTCCATTGGCG
CGTGGCAATAGTCGTTTTGCATGGATGACTCGGAAGTCTGAAGAAACAATTACCCCA
TGGAATTTTGAAGAAGTTGTCGATAAAGGTGCTTCAGCTCAATCATTTATTGAACGC
ATGACAAACTTTGATAAAAATCTTCCAAATGAAAAAGTACTACCAAAACATAGTTTG
CTTTATGAGTATTTTACGGTTTATAACGAATTGACAAAGGTCAAATATGTTACTGAG
GGAATGCGAAAACCAGCATTTCTTTCAGGTGAACAGAAGAAAGCCATTGTTGATTTA
CTCTTCAAAACAAATCGAAAAGTAACCGTTAAGCAATTAAAAGAAGATTATTTCAA
AAAAATAGAATGTTTTGATAGTGTTGAAATTTCAGGAGTTGAAGATAGATTTAATGC
TTCATTAGGCGCCTACCATGATTTGCTAAAAATTATTAAAGATAAAGATTTTTTGGA
TAATGAAGAAAATGAAGATATCTTAGAGGATATTGTTTTAACATTGACCTTATTTGA
AGATAGGGGGATGATTGAGGAAAGACTTAAAACATATGCTCACCTCTTTGATGATA
AGGTGATGAAACAGCTTAAACGTCGCCGTTATACTGGTTGGGGACGTTTGTCTCGAA
AATTGATTAATGGTATTAGGGATAAGCAATCTGGCAAAACAATATTAGATTTTTTGA
AATCAGATGGTTTTGCCAATCGCAATTTTATGCAGCTGATCCATGATGATAGTTTGA
CATTTAAAGAAGATATTCAAAAAGCACAGGTGTCTGGACAAGGCCATAGTTTACAT
GAACAGATTGCTAACTTAGCTGGCAGTCCTGCTATTAAAAAAGGTATTTTACAGACT
GTAAAAATTGTTGATGAACTGGTCAAAGTAATGGGGCATAAGCCAGAAAATATCGT
TATTGAAATGGCACGTGAAAATCAGACAACTCAAAAGGGCCAGAAAAATTCGCGAG
AGCGTATGAAACGAATCGAAGAAGGTATCAAAGAATTAGGAAGTCAGATTCTTAAA
GAGCATCCTGTTGAAAATACTCAATTGCAAAATGAAAAGCTCTATCTCTATTATCTA
CAAAATGGAAGAGACATGTATGTGGACCAAGAATTAGATATTAATCGTTTAAGTGA
TTATGATGTCGATCACATTGTTCCACAAAGTTTCATTAAAGACGATTCAATAGACAA
TAAGGTACTAACGCGTTCTGATAAAAATCGTGGTAAATCGGATAACGTTCCAAGTGA
AGAAGTAGTCAAAAAGATGAAAAACTATTGGAGACAACTTCTAAACGCCAAGTTAA
TCACTCAACGTAAGTTTGATAATTTAACGAAAGCTGAACGTGGAGGTTTGAGTGAAC
TTGATAAAGCTGGTTTTATCAAACGCCAATTGGTTGAAACTCGCCAAATCACTAAGC
ATGTGGCACAAATTTTGGATAGTCGCATGAATACTAAATACGATGAAAATGATAAA
CTTATTCGAGAGGTTAAAGTGATTACCTTAAAATCTAAATTAGTTTCTGACTTCCGA
AAAGATTTCCAATTCTATAAAGTACGTGAGATTAACAATTACCATCATGCCCATGAT
GCGTATCTAAATGCCGTCGTTGGAACTGCTTTGATTAAGAAATATCCAAAACTTGAA
TCGGAGTTTGTCTATGGTGATTATAAAGTTTATGATGTTCGTAAAATGATTGCTAAGT
CTGAGCAAGAAATAGGCAAAGCAACCGCAAAATATTTCTTTTACTCTAATATCATGA
ACTTCTTCAAAACAGAAATTACACTTGCAAATGGAGAGATTCGCAAACGCCCTCTAA
TCGAAACTAATGGGGAAACTGGAGAAATTGTCTGGGATAAAGGGCGAGATTTTGCC
ACAGTGCGCAAAGTATTGTCCATGCCCCAAGTCAATATTGTCAAGAAAACAGAAGT
ACAGACAGGCGGATTCTCCAAGGAGTCAATTTTACCAAAAAGAAATTCGGACAAGC
TTATTGCTCGTAAAAAAGACTGGGATCCAAAAAAATATGGTGGTTTTGATAGTCCAA
CGGTAGCTTATTCAGTCCTAGTGGTTGCTAAGGTGGAAAAAGGGAAATCGAAGAAG
TTAAAATCCGTTAAAGAGTTACTAGGGATCACAATTATGGAAAGAAGTTCCTTTGAA
AAAAATCCGATTGACTTTTTAGAAGCTAAAGGATATAAGGAAGTTAAAAAAGACTT
AATCATTAAACTACCTAAATATAGTCTTTTTGAGTTAGAAAACGGTCGTAAACGGAT
GCTGGCTAGTGCCGGAGAATTACAAAAAGGAAATGAGCTGGCTCTGCCAAGCAAAT
ATGTGAATTTTTTATATTTAGCTAGTCATTATGAAAAGTTGAAGGGTAGTCCAGAAG
ATAACGAACAAAAACAATTGTTTGTGGAGCAGCATAAGCATTATTTAGATGAGATT
ATTGAGCAAATCAGTGAATTTTCTAAGCGTGTTATTTTAGCAGATGCCAATTTAGAT
AAAGTTCTTAGTGCATATAACAAACATAGAGACAAACCAATACGTGAACAAGCAGA
AAATATTATTCATTTATTTACGTTGACGAATCTTGGAGCTCCCGCTGCTTTTAAATAT
TTTGATACAACAATTGATCGTAAACGATATACGTCTACAAAAGAAGTTTTAGATGCC
ACTCTTATCCATCAATCCATCACTGGTCTTTATGAAACACGCATTGATTTGAGTCAGC
TAGGAGGTGACTGA
MDKKYSIGLDIGTNSVGWAVITDDYKVPSKKFKVLGNTDRHSIKKNLIGALLFGSGETA
EATRLKRTARRRYTRRKNRICYLQEIFSNEMAKVDDSFFHRLEESFLVEEDKKHERHPIF
GNIVDEVAYHEKYPTIYHLRKKLADSTDKADLRLIYLALAHMIKFRGHFLIEGDLNPDNS
DVDKLFIQLVQIYNQLFEENPINASRVDAKAILSARLSKSRRLENLIAQLPGEKRNGLFGN
LIALSLGLTPNFKSNFDLAEDAKLQLSKDTYDDDLDNLLAQIGDQYADLFLAAKNLSDA
ILLSDILRVNSEITKAPLSASMIKRYDEHHQDLTLLKALVRQQLPEKYKEIFFDQSKNGYA
GYIDGGASQEEFYKFIKPILEKMDGTEELLVKLNREDLLRKQRTFDNGSIPHQIHLGELH
AILRRQEDFYPFLKDNREKIEKILTFRIPYYVGPLARGNSRFAWMTRKSEETITPWNFEEV
VDKGASAQSFIERMTNFDKNLPNEKVLPKHSLLYEYFTVYNELTKVKYVTEGMRKPAF
LSGEQKKAIVDLLFKTNRKVTVKQLKEDYFKKIECFDSVEISGVEDRFNASLGAYHDLL
KIIKDKDFLDNEENEDILEDIVLTLTLFEDRGMIEERLKTYAHLFDDKVMKQLKRRRYTG
WGRLSRKLINGIRDKQSGKTILDFLKSDGFANRNFMQLIHDDSLTFKEDIQKAQVSGQG
HSLHEQIANLAGSPAIKKGILQTVKIVDELVKVMGHKPENIVIEMARENQTTQKGQKNS
RERMKRIEEGIKELGSQILKEHPVENTQLQNEKLYLYYLQNGRDMYVDQELDINRLSDY
DVDHIVPQSFIKDDSIDNKVLTRSDKNRGKSDNVPSEEVVKKMKNYWRQLLNAKLITQ
RKFDNLTKAERGGLSELDKAGFIKRQLVETRQITKHVAQILDSRMNTKYDENDKLIREV
KVITLKSKLVSDFRKDFQFYKVREINNYHHAHDAYLNAVVGTALIKKYPKLESEFVYGD
YKVYDVRKMIAKSEQEIGKATAKYFFYSNIMNFFKTEITLANGEIRKRPLIETNGETGEIV
WDKGRDFATVRKVLSMPQVNIVKKTEVQTGGFSKESILPKRNSDKLIARKKDWDPKKY
GGFDSPTVAYSVLVVAKVEKGKSKKLKSVKELLGITIMERSSFEKNPIDFLEAKGYKEV
KKDLIIKLPKYSLFELENGRKRMLASAGELQKGNELALPSKYVNFLYLASHYEKLKGSP
EDNEQKQLFVEQHKHYLDEIIEQISEFSKRVILADANLDKVLSAYNKHRDKPIREQAENII
HLFTLTNLGAPAAFKYFDTTIDRKRYTSTKEVLDATLIHQSITGLYETRIDLSQLGGD
(single underline: HNH domain; double underline: RuvC domain)

[0300] In some embodiments, wild type Cas9 corresponds to, or comprises the following nucleotide and/or amino acid sequences:

ATGGATAAAAAGTATTCTATTGGTTTAGACATCGGCACTAATTCCGTTGGATGGGCT
GTCATAACCGATGAATACAAAGTACCTTCAAAGAAATTTAAGGTGTTGGGGAACAC
AGACCGTCATTCGATTAAAAAGAATCTTATCGGTGCCCTCCTATTCGATAGTGGCGA
AACGGCAGAGGCGACTCGCCTGAAACGAACCGCTCGGAGAAGGTATACACGTCGCA
AGAACCGAATATGTTACTTACAAGAAATTTTTAGCAATGAGATGGCCAAAGTTGAC
GATTCTTTCTTTCACCGTTTGGAAGAGTCCTTCCTTGTCGAAGAGGACAAGAAACAT
GAACGGCACCCCATCTTTGGAAACATAGTAGATGAGGTGGCATATCATGAAAAGTA
CCCAACGATTTATCACCTCAGAAAAAAGCTAGTTGACTCAACTGATAAAGCGGACCT
GAGGTTAATCTACTTGGCTCTTGCCCATATGATAAAGTTCCGTGGGCACTTTCTCATT
GAGGGTGATCTAAATCCGGACAACTCGGATGTCGACAAACTGTTCATCCAGTTAGTA
CAAACCTATAATCAGTTGTTTGAAGAGAACCCTATAAATGCAAGTGGCGTGGATGC
GAAGGCTATTCTTAGCGCCCGCCTCTCTAAATCCCGACGGCTAGAAAACCTGATCGC
ACAATTACCCGGAGAGAAGAAAAATGGGTTGTTCGGTAACCTTATAGCGCTCTCACT
AGGCCTGACACCAAATTTTAAGTCGAACTTCGACTTAGCTGAAGATGCCAAATTGCA
GCTTAGTAAGGACACGTACGATGACGATCTCGACAATCTACTGGCACAAATTGGAG
ATCAGTATGCGGACTTATTTTTGGCTGCCAAAAACCTTAGCGATGCAATCCTCCTAT
CTGACATACTGAGAGTTAATACTGAGATTACCAAGGCGCCGTTATCCGCTTCAATGA
TCAAAAGGTACGATGAACATCACCAAGACTTGACACTTCTCAAGGCCCTAGTCCGTC
AGCAACTGCCTGAGAAATATAAGGAAATATTCTTTGATCAGTCGAAAAACGGGTAC
GCAGGTTATATTGACGGCGGAGCGAGTCAAGAGGAATTCTACAAGTTTATCAAACC
CATATTAGAGAAGATGGATGGGACGGAAGAGTTGCTTGTAAAACTCAATCGCGAAG
ATCTACTGCGAAAGCAGCGGACTTTCGACAACGGTAGCATTCCACATCAAATCCACT
TAGGCGAATTGCATGCTATACTTAGAAGGCAGGAGGATTTTTATCCGTTCCTCAAAG
ACAATCGTGAAAAGATTGAGAAAATCCTAACCTTTCGCATACCTTACTATGTGGGAC
CCCTGGCCCGAGGGAACTCTCGGTTCGCATGGATGACAAGAAAGTCCGAAGAAACG
ATTACTCCATGGAATTTTGAGGAAGTTGTCGATAAAGGTGCGTCAGCTCAATCGTTC
ATCGAGAGGATGACCAACTTTGACAAGAATTTACCGAACGAAAAAGTATTGCCTAA
GCACAGTTTACTTTACGAGTATTTCACAGTGTACAATGAACTCACGAAAGTTAAGTA
TGTCACTGAGGGCATGCGTAAACCCGCCTTTCTAAGCGGAGAACAGAAGAAAGCAA
TAGTAGATCTGTTATTCAAGACCAACCGCAAAGTGACAGTTAAGCAATTGAAAGAG
GACTACTTTAAGAAAATTGAATGCTTCGATTCTGTCGAGATCTCCGGGGTAGAAGAT
CGATTTAATGCGTCACTTGGTACGTATCATGACCTCCTAAAGATAATTAAAGATAAG
GACTTCCTGGATAACGAAGAGAATGAAGATATCTTAGAAGATATAGTGTTGACTCTT
ACCCTCTTTGAAGATCGGGAAATGATTGAGGAAAGACTAAAAACATACGCTCACCT
GTTCGACGATAAGGTTATGAAACAGTTAAAGAGGCGTCGCTATACGGGCTGGGGAC
GATTGTCGCGGAAACTTATCAACGGGATAAGAGACAAGCAAAGTGGTAAAACTATT
CTCGATTTTCTAAAGAGCGACGGCTTCGCCAATAGGAACTTTATGCAGCTGATCCAT
GATGACTCTTTAACCTTCAAAGAGGATATACAAAAGGCACAGGTTTCCGGACAAGG
GGACTCATTGCACGAACATATTGCGAATCTTGCTGGTTCGCCAGCCATCAAAAAGGG
CATACTCCAGACAGTCAAAGTAGTGGATGAGCTAGTTAAGGTCATGGGACGTCACA
AACCGGAAAACATTGTAATCGAGATGGCACGCGAAAATCAAACGACTCAGAAGGG
GCAAAAAAACAGTCGAGAGCGGATGAAGAGAATAGAAGAGGGTATTAAAGAACTG
GGCAGCCAGATCTTAAAGGAGCATCCTGTGGAAAATACCCAATTGCAGAACGAGAA
ACTTTACCTCTATTACCTACAAAATGGAAGGGACATGTATGTTGATCAGGAACTGGA
CATAAACCGTTTATCTGATTACGACGTCGATCACATTGTACCCCAATCCTTTTTGAAG
GACGATTCAATCGACAATAAAGTGCTTACACGCTCGGATAAGAACCGAGGGAAAAG
TGACAATGTTCCAAGCGAGGAAGTCGTAAAGAAAATGAAGAACTATTGGCGGCAGC
TCCTAAATGCGAAACTGATAACGCAAAGAAAGTTCGATAACTTAACTAAAGCTGAG
AGGGGTGGCTTGTCTGAACTTGACAAGGCCGGATTTATTAAACGTCAGCTCGTGGAA
ACCCGCCAAATCACAAAGCATGTTGCACAGATACTAGATTCCCGAATGAATACGAA
ATACGACGAGAACGATAAGCTGATTCGGGAAGTCAAAGTAATCACTTTAAAGTCAA
AATTGGTGTCGGACTTCAGAAAGGATTTTCAATTCTATAAAGTTAGGGAGATAAATA
ACTACCACCATGCGCACGACGCTTATCTTAATGCCGTCGTAGGGACCGCACTCATTA
AGAAATACCCGAAGCTAGAAAGTGAGTTTGTGTATGGTGATTACAAAGTTTATGAC
GTCCGTAAGATGATCGCGAAAAGCGAACAGGAGATAGGCAAGGCTACAGCCAAAT
ACTTCTTTTATTCTAACATTATGAATTTCTTTAAGACGGAAATCACTCTGGCAAACGG
AGAGATACGCAAACGACCTTTAATTGAAACCAATGGGGAGACAGGTGAAATCGTAT
GGGATAAGGGCCGGGACTTCGCGACGGTGAGAAAAGTTTTGTCCATGCCCCAAGTC
AACATAGTAAAGAAAACTGAGGTGCAGACCGGAGGGTTTTCAAAGGAATCGATTCT
TCCAAAAAGGAATAGTGATAAGCTCATCGCTCGTAAAAAGGACTGGGACCCGAAAA
AGTACGGTGGCTTCGATAGCCCTACAGTTGCCTATTCTGTCCTAGTAGTGGCAAAAG
TTGAGAAGGGAAAATCCAAGAAACTGAAGTCAGTCAAAGAATTATTGGGGATAACG
ATTATGGAGCGCTCGTCTTTTGAAAAGAACCCCATCGACTTCCTTGAGGCGAAAGGT
TACAAGGAAGTAAAAAAGGATCTCATAATTAAACTACCAAAGTATAGTCTGTTTGA
GTTAGAAAATGGCCGAAAACGGATGTTGGCTAGCGCCGGAGAGCTTCAAAAGGGGA
ACGAACTCGCACTACCGTCTAAATACGTGAATTTCCTGTATTTAGCGTCCCATTACG
AGAAGTTGAAAGGTTCACCTGAAGATAACGAACAGAAGCAACTTTTTGTTGAGCAG
CACAAACATTATCTCGACGAAATCATAGAGCAAATTTCGGAATTCAGTAAGAGAGT
CATCCTAGCTGATGCCAATCTGGACAAAGTATTAAGCGCATACAACAAGCACAGGG
ATAAACCCATACGTGAGCAGGCGGAAAATATTATCCATTTGTTTACTCTTACCAACC
TCGGCGCTCCAGCCGCATTCAAGTATTTTGACACAACGATAGATCGCAAACGATACA
CTTCTACCAAGGAGGTGCTAGACGCGACACTGATTCACCAATCCATCACGGGATTAT
ATGAAACTCGGATAGATTTGTCACAGCTTGGGGGTGACGGATCCCCCAAGAAGAAG
AGGAAAGTCTCGAGCGACTACAAAGACCATGACGGTGATTATAAAGATCATGACAT
CGATTACAAGGATGACGATGACAAGGCTGCAGGA
MDKKYSIGLAIGTNSVGWAVITDEYKVPSKKFKVLGNTDRHSIKKNLIGALLFDSGETA
EATRLKRTARRRYTRRKNRICYLQEIFSNEMAKVDDSFFHRLEESFLVEEDKKHERHPIF
GNIVDEVAYHEKYPTIYHLRKKLVDSTDKADLRLIYLALAHMIKFRGHFLIEGDLNPDNS
DVDKLFIQLVQTYNQLFEENPINASGVDAKAILSARLSKSRRLENLIAQLPGEKKNGLFG
NLIALSLGLTPNFKSNFDLAEDAKLQLSKDTYDDDLDNLLAQIGDQYADLFLAAKNLSD
AILLSDILRVNTEITKAPLSASMIKRYDEHHQDLTLLKALVRQQLPEKYKEIFFDQSKNGY
AGYIDGGASQEEFYKFIKPILEKMDGTEELLVKLNREDLLRKQRTFDNGSIPHQIHLGEL
HAILRRQEDFYPFLKDNREKIEKILTFRIPYYVGPLARGNSRFAWMTRKSEETITPWNFEE
VVDKGASAQSFIERMTNFDKNLPNEKVLPKHSLLYEYFTVYNELTKVKYVTEGMRKPA
FLSGEQKKAIVDLLFKTNRKVTVKQLKEDYFKKIECFDSVEISGVEDRFNASLGTYHDLL
KIIKDKDFLDNEENEDILEDIVLTLTLFEDREMIEERLKTYAHLFDDKVMKQLKRRRYTG
WGRLSRKLINGIRDKQSGKTILDFLKSDGFANRNFMQLIHDDSLTFKEDIQKAQVSGQG
DSLHEHIANLAGSPAIKKGILQTVKVVDELVKVMGRHKPENIVIEMARENQTTQKGQKN
SRERMKRIEEGIKELGSQILKEHPVENTQLQNEKLYLYYLQNGRDMYVDQELDINRLSD
YDVDHIVPQSFLKDDSIDNKVLTRSDKNRGKSDNVPSEEVVKKMKNYWRQLLNAKLIT
QRKFDNLTKAERGGLSELDKAGFIKRQLVETRQITKHVAQILDSRMNTKYDENDKLIRE
VKVITLKSKLVSDFRKDFQFYKVREINNYHHAHDAYLNAVVGTALIKKYPKLESEFVYG
DYKVYDVRKMIAKSEQEIGKATAKYFFYSNIMNFFKTEITLANGEIRKRPLIETNGETGEI
VWDKGRDFATVRKVLSMPQVNIVKKTEVQTGGFSKESILPKRNSDKLIARKKDWDPKK
YGGFDSPTVAYSVLVVAKVEKGKSKKLKSVKELLGITIMERSSFEKNPIDFLEAKGYKE
VKKDLIIKLPKYSLFELENGRKRMLASAGELQKGNELALPSKYVNFLYLASHYEKLKGS
PEDNEQKQLFVEQHKHYLDEIIEQISEFSKRVILADANLDKVLSAYNKHRDKPIREQAENI
IHLFTLTNLGAPAAFKYFDTTIDRKRYTSTKEVLDATLIHQSITGLYETRIDLSQLGGD
(single underline: HNH domain; double underline: RuvC domain)

[0301] In some embodiments, wild type Cas9 corresponds to Cas9 from Streptococcus pyogenes (NCBI Reference Sequence: NC_002737.2 (nucleotide sequence as follows); and Uniprot Reference Sequence: Q99ZW2 (amino acid sequence as follows).

ATGGATAAGAAATACTCAATAGGCTTAGATATCGGCACAAATAGCGTCGGATGGGC
GGTGATCACTGATGAATATAAGGTTCCGTCTAAAAAGTTCAAGGTTCTGGGAAATAC
AGACCGCCACAGTATCAAAAAAAATCTTATAGGGGCTCTTTTATTTGACAGTGGAGA
GACAGCGGAAGCGACTCGTCTCAAACGGACAGCTCGTAGAAGGTATACACGTCGGA
AGAATCGTATTTGTTATCTACAGGAGATTTTTTCAAATGAGATGGCGAAAGTAGATG
ATAGTTTCTTTCATCGACTTGAAGAGTCTTTTTTGGTGGAAGAAGACAAGAAGCATG
AACGTCATCCTATTTTTGGAAATATAGTAGATGAAGTTGCTTATCATGAGAAATATC
CAACTATCTATCATCTGCGAAAAAAATTGGTAGATTCTACTGATAAAGCGGATTTGC
GCTTAATCTATTTGGCCTTAGCGCATATGATTAAGTTTCGTGGTCATTTTTTGATTGA
GGGAGATTTAAATCCTGATAATAGTGATGTGGACAAACTATTTATCCAGTTGGTACA
AACCTACAATCAATTATTTGAAGAAAACCCTATTAACGCAAGTGGAGTAGATGCTA
AAGCGATTCTTTCTGCACGATTGAGTAAATCAAGACGATTAGAAAATCTCATTGCTC
AGCTCCCCGGTGAGAAGAAAAATGGCTTATTTGGGAATCTCATTGCTTTGTCATTGG
GTTTGACCCCTAATTTTAAATCAAATTTTGATTTGGCAGAAGATGCTAAATTACAGC
TTTCAAAAGATACTTACGATGATGATTTAGATAATTTATTGGCGCAAATTGGAGATC
AATATGCTGATTTGTTTTTGGCAGCTAAGAATTTATCAGATGCTATTTTACTTTCAGA
TATCCTAAGAGTAAATACTGAAATAACTAAGGCTCCCCTATCAGCTTCAATGATTAA
ACGCTACGATGAACATCATCAAGACTTGACTCTTTTAAAAGCTTTAGTTCGACAACA
ACTTCCAGAAAAGTATAAAGAAATCTTTTTTGATCAATCAAAAAACGGATATGCAG
GTTATATTGATGGGGGAGCTAGCCAAGAAGAATTTTATAAATTTATCAAACCAATTT
TAGAAAAAATGGATGGTACTGAGGAATTATTGGTGAAACTAAATCGTGAAGATTTG
CTGCGCAAGCAACGGACCTTTGACAACGGCTCTATTCCCCATCAAATTCACTTGGGT
GAGCTGCATGCTATTTTGAGAAGACAAGAAGACTTTTATCCATTTTTAAAAGACAAT
CGTGAGAAGATTGAAAAAATCTTGACTTTTCGAATTCCTTATTATGTTGGTCCATTGG
CGCGTGGCAATAGTCGTTTTGCATGGATGACTCGGAAGTCTGAAGAAACAATTACCC
CATGGAATTTTGAAGAAGTTGTCGATAAAGGTGCTTCAGCTCAATCATTTATTGAAC
GCATGACAAACTTTGATAAAAATCTTCCAAATGAAAAAGTACTACCAAAACATAGT
TTGCTTTATGAGTATTTTACGGTTTATAACGAATTGACAAAGGTCAAATATGTTACTG
AAGGAATGCGAAAACCAGCATTTCTTTCAGGTGAACAGAAGAAAGCCATTGTTGAT
TTACTCTTCAAAACAAATCGAAAAGTAACCGTTAAGCAATTAAAAGAAGATTATTTC
AAAAAAATAGAATGTTTTGATAGTGTTGAAATTTCAGGAGTTGAAGATAGATTTAAT
GCTTCATTAGGTACCTACCATGATTTGCTAAAAATTATTAAAGATAAAGATTTTTTG
GATAATGAAGAAAATGAAGATATCTTAGAGGATATTGTTTTAACATTGACCTTATTT
GAAGATAGGGAGATGATTGAGGAAAGACTTAAAACATATGCTCACCTCTTTGATGA
TAAGGTGATGAAACAGCTTAAACGTCGCCGTTATACTGGTTGGGGACGTTTGTCTCG
AAAATTGATTAATGGTATTAGGGATAAGCAATCTGGCAAAACAATATTAGATTTTTT
GAAATCAGATGGTTTTGCCAATCGCAATTTTATGCAGCTGATCCATGATGATAGTTT
GACATTTAAAGAAGACATTCAAAAAGCACAAGTGTCTGGACAAGGCGATAGTTTAC
ATGAACATATTGCAAATTTAGCTGGTAGCCCTGCTATTAAAAAAGGTATTTTACAGA
CTGTAAAAGTTGTTGATGAATTGGTCAAAGTAATGGGGCGGCATAAGCCAGAAAAT
ATCGTTATTGAAATGGCACGTGAAAATCAGACAACTCAAAAGGGCCAGAAAAATTC
GCGAGAGCGTATGAAACGAATCGAAGAAGGTATCAAAGAATTAGGAAGTCAGATTC
TTAAAGAGCATCCTGTTGAAAATACTCAATTGCAAAATGAAAAGCTCTATCTCTATT
ATCTCCAAAATGGAAGAGACATGTATGTGGACCAAGAATTAGATATTAATCGTTTAA
GTGATTATGATGTCGATCACATTGTTCCACAAAGTTTCCTTAAAGACGATTCAATAG
ACAATAAGGTCTTAACGCGTTCTGATAAAAATCGTGGTAAATCGGATAACGTTCCAA
GTGAAGAAGTAGTCAAAAAGATGAAAAACTATTGGAGACAACTTCTAAACGCCAAG
TTAATCACTCAACGTAAGTTTGATAATTTAACGAAAGCTGAACGTGGAGGTTTGAGT
GAACTTGATAAAGCTGGTTTTATCAAACGCCAATTGGTTGAAACTCGCCAAATCACT
AAGCATGTGGCACAAATTTTGGATAGTCGCATGAATACTAAATACGATGAAAATGA
TAAACTTATTCGAGAGGTTAAAGTGATTACCTTAAAATCTAAATTAGTTTCTGACTTC
CGAAAAGATTTCCAATTCTATAAAGTACGTGAGATTAACAATTACCATCATGCCCAT
GATGCGTATCTAAATGCCGTCGTTGGAACTGCTTTGATTAAGAAATATCCAAAACTT
GAATCGGAGTTTGTCTATGGTGATTATAAAGTTTATGATGTTCGTAAAATGATTGCT
AAGTCTGAGCAAGAAATAGGCAAAGCAACCGCAAAATATTTCTTTTACTCTAATATC
ATGAACTTCTTCAAAACAGAAATTACACTTGCAAATGGAGAGATTCGCAAACGCCCT
CTAATCGAAACTAATGGGGAAACTGGAGAAATTGTCTGGGATAAAGGGCGAGATTT
TGCCACAGTGCGCAAAGTATTGTCCATGCCCCAAGTCAATATTGTCAAGAAAACAG
AAGTACAGACAGGCGGATTCTCCAAGGAGTCAATTTTACCAAAAAGAAATTCGGAC
AAGCTTATTGCTCGTAAAAAAGACTGGGATCCAAAAAAATATGGTGGTTTTGATAGT
CCAACGGTAGCTTATTCAGTCCTAGTGGTTGCTAAGGTGGAAAAAGGGAAATCGAA
GAAGTTAAAATCCGTTAAAGAGTTACTAGGGATCACAATTATGGAAAGAAGTTCCTT
TGAAAAAAATCCGATTGACTTTTTAGAAGCTAAAGGATATAAGGAAGTTAAAAAAG
ACTTAATCATTAAACTACCTAAATATAGTCTTTTTGAGTTAGAAAACGGTCGTAAAC
GGATGCTGGCTAGTGCCGGAGAATTACAAAAAGGAAATGAGCTGGCTCTGCCAAGC
AAATATGTGAATTTTTTATATTTAGCTAGTCATTATGAAAAGTTGAAGGGTAGTCCA
GAAGATAACGAACAAAAACAATTGTTTGTGGAGCAGCATAAGCATTATTTAGATGA
GATTATTGAGCAAATCAGTGAATTTTCTAAGCGTGTTATTTTAGCAGATGCCAATTT
AGATAAAGTTCTTAGTGCATATAACAAACATAGAGACAAACCAATACGTGAACAAG
CAGAAAATATTATTCATTTATTTACGTTGACGAATCTTGGAGCTCCCGCTGCTTTTAA
ATATTTTGATACAACAATTGATCGTAAACGATATACGTCTACAAAAGAAGTTTTAGA
TGCCACTCTTATCCATCAATCCATCACTGGTCTTTATGAAACACGCATTGATTTGAGT
CAGCTAGGAGGTGACTGA
MDKKYSIGLDIGTNSVGWAVITDEYKVPSKKFKVLGNTDRHSIKKNLIGALLF
DSGETAEATRLKRTARRRYTRRKNRICYLQEIFSNEMAKVDDSFFHRLEESFLVEEDKK
HERHPIFGNIVDEVAYHEKYPTIYHLRKKLVDSTDKADLRLIYLALAHMIKFRGHFLIEG
DLNPDNSDVDKLFIQLVQTYNQLFEENPINASGVDAKAILSARLSKSRRLENLIAQLPGE
KKNGLFGNLIALSLGLTPNFKSNFDLAEDAKLQLSKDTYDDDLDNLLAQIGDQYADLFL
AAKNLSDAILLSDILRVNTEITKAPLSASMIKRYDEHHQDLTLLKALVRQQLPEKYKEIFF
DQSKNGYAGYIDGGASQEEFYKFIKPILEKMDGTEELLVKLNREDLLRKQRTFDNGSIPH
QIHLGELHAILRRQEDFYPFLKDNREKIEKILTFRIPYYVGPLARGNSRFAWMTRKSEETI
TPWNFEEVVDKGASAQSFIERMTNFDKNLPNEKVLPKHSLLYEYFTVYNELTKVKYVTE
GMRKPAFLSGEQKKAIVDLLFKTNRKVTVKQLKEDYFKKIECFDSVEISGVEDRFNASL
GTYHDLLKIIKDKDFLDNEENEDILEDIVLTLTLFEDREMIEERLKTYAHLFDDKVMKQL
KRRRYTGWGRLSRKLINGIRDKQSGKTILDFLKSDGFANRNFMQLIHDDSLTFKEDIQKA
QVSGQGDSLHEHIANLAGSPAIKKGILQTVKVVDELVKVMGRHKPENIVIEMARENQTT
QKGQKNSRERMKRIEEGIKELGSQILKEHPVENTQLQNEKLYLYYLQNGRDMYVDQEL
DINRLSDYDVDHIVPQSFLKDDSIDNKVLTRSDKNRGKSDNVPSEEVVKKMKNYWRQL
LNAKLITQRKFDNLTKAERGGLSELDKAGFIKRQLVETRQITKHVAQILDSRMNTKYDE
NDKLIREVKVITLKSKLVSDFRKDFQFYKVREINNYHHAHDAYLNAVVGTALIKKYPKL
ESEFVYGDYKVYDVRKMIAKSEQEIGKATAKYFFYSNIMNFFKTEITLANGEIRKRPLIET
NGETGEIVWDKGRDFATVRKVLSMPQVNIVKKTEVQTGGFSKESILPKRNSDKLIARKK
DWDPKKYGGFDSPTVAYSVLVVAKVEKGKSKKLKSVKELLGITIMERSSFEKNPIDFLE
AKGYKEVKKDLIIKLPKYSLFELENGRKRMLASAGELQKGNELALPSKYVNFLYLASHY
EKLKGSPEDNEQKQLFVEQHKHYLDEIIEQISEFSKRVILADANLDKVLSAYNKHRDKPI
REQAENIIHLFTLTNLGAPAAFKYFDTTIDRKRYTSTKEVLDATLIHQSITGLYETRIDLSQ
LGGD
(single underline: HNH domain; double underline: RuvC domain)

[0302] In some embodiments, Cas9 refers to Cas9 from: Corynebacterium ulcerans (NCBI Refs: NC_015683.1, NC_017317.1); Corynebacterium diphtheria (NCBI Refs: NC_016782.1, NC_016786.1); Spiroplasma syrphidicola (NCBI Ref: NC_021284.1); Prevotella intermedia (NCBI Ref: NC_017861.1); Spiroplasma taiwanense (NCBI Ref: NC_021846.1); Streptococcus iniae (NCBI Ref: NC_021314.1); Belliella baltica (NCBI Ref: NC_018010.1); Psychroflexus torquisI (NCBI Ref: NC_018721.1); Streptococcus thermophilus (NCBI Ref: YP_820832.1), Listeria innocua (NCBI Ref: NP_472073.1), Campylobacter jejuni (NCBI Ref: YP_002344900.1) or Neisseria. meningitidis (NCBI Ref: YP_002342100.1) or to a Cas9 from any other organism.

[0303] In some embodiments, dCas9 corresponds to, or comprises in part or in whole, a Cas9 amino acid sequence having one or more mutations that inactivate the Cas9 nuclease activity. For example, in some embodiments, a dCas9 domain comprises D10A and an H840A mutation or corresponding mutations in another Cas9. In some embodiments, the dCas9 comprises the amino acid sequence of dCas9 (D10A and H840A):

MDKKYSIGLAIGTNSVGWAVITDEYKVPSKKFKVLGNTDRHSIKKNLIGA
LLFDSGETAEATRLKRTARRRYTRRKNRICYLQEIFSNEMAKVDDSFFHR
LEESFLVEEDKKHERHPIFGNIVDEVAYHEKYPTIYHLRKKLVDSTDKAD
LRLIYLALAHMIKFRGHFLIEGDLNPDNSDVDKLFIQLVQTYNQLFEENP
INASGVDAKAILSARLSKSRRLENLIAQLPGEKKNGLFGNLIALSLGLTP
NFKSNFDLAEDAKLQLSKDTYDDDLDNLLAQIGDQYADLFLAAKNLSDAI
LLSDILRVNTEITKAPLSASMIKRYDEHHQDLTLLKALVRQQLPEKYKEI
FFDQSKNGYAGYIDGGASQEEFYKFIKPILEKMDGTEELLVKLNREDLLR
KQRTFDNGSIPHQIHLGELHAILRRQEDFYPFLKDNREKIEKILTFRIPY
YVGPLARGNSRFAWMTRKSEETITPWNFEEVVDKGASAQSFIERMTNFDK
NLPNEKVLPKHSLLYEYFTVYNELTKVKYVTEGMRKPAFLSGEQKKAIVD
LLFKTNRKVTVKQLKEDYFKKIECFDSVEISGVEDRFNASLGTYHDLLKI
IKDKDFLDNEENEDILEDIVLTLTLFEDREMIEERLKTYAHLFDDKVMKQ
LKRRRYTGWGRLSRKLINGIRDKQSGKTILDFLKSDGFANRNFMQLIHDD
SLTFKEDIQKAQVSGQGDSLHEHIANLAGSPAIKKGILQTVKVVDELVKV
MGRHKPENIVIEMARENQTTQKGQKNSRERMKRIEEGIKELGSQILKEHP
VENTQLQNEKLYLYYLQNGRDMYVDQELDINRLSDYDVDAIVPQSFLKDD
SIDNKVLTRSDKNRGKSDNVPSEEVVKKMKNYWRQLLNAKLITQRKFDNL
TKAERGGLSELDKAGFIKRQLVETRQITKHVAQILDSRMNTKYDENDKLI
REVKVITLKSKLVSDFRKDFQFYKVREINNYHHAHDAYLNAVVGTALIKK
YPKLESEFVYGDYKVYDVRKMIAKSEQEIGKATAKYFFYSNIMNFFKTEI
TLANGEIRKRPLIETNGETGEIVWDKGRDFATVRKVLSMPQVNIVKKTEV
QTGGFSKESILPKRNSDKLIARKKDWDPKKYGGFDSPTVAYSVLVVAKVE
KGKSKKLKSVKELLGITIMERSSFEKNPIDFLEAKGYKEVKKDLIIKLPK
YSLFELENGRKRMLASAGELQKGNELALPSKYVNFLYLASHYEKLKGSPE
DNEQKQLFVEQHKHYLDEIIEQISEFSKRVILADANLDKVLSAYNKHRDK
PIREQAENIIHLFTLTNLGAPAAFKYFDTTIDRKRYTSTKEVLDATLIHQ
SITGLYETRIDLSQLGGD
(single underline: HNH domain; double underline:
RuvC domain).

[0304] In some embodiments, the Cas9 domain comprises a D10A mutation, while the residue at position 840 remains a histidine in the amino acid sequence provided above, or at corresponding positions in any of the amino acid sequences provided herein.

[0305] In other embodiments, dCas9 variants having mutations other than D10A and H840A are provided, which, e.g., result in nuclease inactivated Cas9 (dCas9). Such mutations, by way of example, include other amino acid substitutions at D10 and H840, or other substitutions within the nuclease domains of Cas9 (e.g., substitutions in the HNH nuclease subdomain and/or the RuvC1 subdomain).

[0306] In some embodiments, variants or homologues of dCas9 are provided which are at least about 70% identical, at least about 80% identical, at least about 90% identical, at least about 95% identical, at least about 98% identical, at least about 99% identical, at least about 99.5% identical, or at least about 99.9% identical. In some embodiments, variants of dCas9 are provided having amino acid sequences which are shorter, or longer, by about 5 amino acids, by about 10 amino acids, by about 15 amino acids, by about 20 amino acids, by about 25 amino acids, by about 30 amino acids, by about 40 amino acids, by about 50 amino acids, by about 75 amino acids, by about 100 amino acids or more.

[0307] In some embodiments, Cas9 fusion proteins as provided herein comprise the full-length amino acid sequence of a Cas9 protein, e.g., one of the Cas9 sequences provided herein. In other embodiments, however, fusion proteins as provided herein do not comprise a full-length Cas9 sequence, but only a fragment thereof. For example, in some embodiments, a Cas9 fusion protein provided herein comprises a Cas9 fragment, wherein the fragment binds crRNA and tracrRNA or sgRNA, but does not comprise a functional nuclease domain, e.g., in that it comprises only a truncated version of a nuclease domain or no nuclease domain at all.

[0308] Exemplary amino acid sequences of suitable Cas9 domains and Cas9 fragments are provided herein, and additional suitable sequences of Cas9 domains and fragments will be apparent to those of skill in the art.

[0309] In some embodiments, Cas9 refers to Cas9 from: Corynebacterium ulcerans (NCBI Refs: NC_015683.1, NC_017317.1); Corynebacterium diphtheria (NCBI Refs: NC_016782.1, NC_016786.1); Spiroplasma syrphidicola (NCBI Ref: NC_021284.1); Prevotella intermedia (NCBI Ref: NC_017861.1); Spiroplasma taiwanense (NCBI Ref: NC_021846.1); Streptococcus iniae (NCBI Ref: NC_021314.1); Belliella baltica (NCBI Ref: NC_018010.1); Psychroflexus torquisI (NCBI Ref: NC_018721.1); Streptococcus thermophilus (NCBI Ref: YP_820832.1); Listeria innocua (NCBI Ref: NP_472073.1); Campylobacter jejuni (NCBI Ref: YP_002344900.1); or Neisseria. meningitidis (NCBI Ref: YP_002342100.1).

[0310] It should be appreciated that additional Cas9 proteins (e.g., a nuclease dead Cas9 (dCas9), a Cas9 nickase (nCas9), or a nuclease active Cas9), including variants and homologs thereof, are within the scope of this disclosure. Exemplary Cas9 proteins include, without limitation, those provided below. In some embodiments, the Cas9 protein is a nuclease dead Cas9 (dCas9). In some embodiments, the Cas9 protein is a Cas9 nickase (nCas9). In some embodiments, the Cas9 protein is a nuclease active Cas9.

[0311] Exemplary catalytically inactive Cas9 (dCas9):

DKKYSIGLAIGTNSVGWAVITDEYKVPSKKFKVLGNTDRHSIKKNLIGAL
LFDSGETAEATRLKRTARRRYTRRKNRICYLQEIFSNEMAKVDDSFFHRL
EESFLVEEDKKHERHPIFGNIVDEVAYHEKYPTIYHLRKKLVDSTDKADL
RLIYLALAHMIKFRGHFLIEGDLNPDNSDVDKLFIQLVQTYNQLFEENPI
NASGVDAKAILSARLSKSRRLENLIAQLPGEKKNGLFGNLIALSLGLTPN
FKSNFDLAEDAKLQLSKDTYDDDLDNLLAQIGDQYADLFLAAKNLSDAIL
LSDILRVNTEITKAPLSASMIKRYDEHHQDLTLLKALVRQQLPEKYKEIF
FDQSKNGYAGYIDGGASQEEFYKFIKPILEKMDGTEELLVKLNREDLLRK
QRTFDNGSIPHQIHLGELHAILRRQEDFYPFLKDNREKIEKILTFRIPYY
VGPLARGNSRFAWMTRKSEETITPWNFEEVVDKGASAQSFIERMTNFDKN
LPNEKVLPKHSLLYEYFTVYNELTKVKYVTEGMRKPAFLSGEQKKAIVDL
LFKTNRKVTVKQLKEDYFKKIECFDSVEISGVEDRFNASLGTYHDLLKII
KDKDFLDNEENEDILEDIVLTLTLFEDREMIEERLKTYAHLFDDKVMKQL
KRRRYTGWGRLSRKLINGIRDKQSGKTILDFLKSDGFANRNFMQLIHDDS
LTFKEDIQKAQVSGQGDSLHEHIANLAGSPAIKKGILQTVKVVDELVKVM
GRHKPENIVIEMARENQTTQKGQKNSRERMKRIEEGIKELGSQILKEHPV
ENTQLQNEKLYLYYLQNGRDMYVDQELDINRLSDYDVDAIVPQSFLKDDS
IDNKVLTRSDKNRGKSDNVPSEEVVKKMKNYWRQLLNAKLITQRKFDNLT
KAERGGLSELDKAGFIKRQLVETRQITKHVAQILDSRMNTKYDENDKLIR
EVKVITLKSKLVSDFRKDFQFYKVREINNYHHAHDAYLNAVVGTALIKKY
PKLESEFVYGDYKVYDVRKMIAKSEQEIGKATAKYFFYSNIMNFFKTEIT
LANGEIRKRPLIETNGETGEIVWDKGRDFATVRKVLSMPQVNIVKKTEVQ
TGGFSKESILPKRNSDKLIARKKDWDPKKYGGFDSPTVAYSVLVVAKVEK
GKSKKLKSVKELLGITIMERSSFEKNPIDFLEAKGYKEVKKDLIIKLPKY
SLFELENGRKRMLASAGELQKGNELALPSKYVNFLYLASHYEKLKGSPED
NEQKQLFVEQHKHYLDEIIEQISEFSKRVILADANLDKVLSAYNKHRDKP
IREQAENIIHLFTLTNLGAPAAFKYFDTTIDRKRYTSTKEVLDATLIHQS
ITGLYETRIDLSQLGGD

[0312] Exemplary catalytically Cas9 nickase (nCas9):

DKKYSIGLAIGTNSVGWAVITDEYKVPSKKFKVLGNTDRHSIKKNLIGAL
LFDSGETAEATRLKRTARRRYTRRKNRICYLQEIFSNEMAKVDDSFFHRL
EESFLVEEDKKHERHPIFGNIVDEVAYHEKYPTIYHLRKKLVDSTDKADL
RLIYLALAHMIKFRGHFLIEGDLNPDNSDVDKLFIQLVQTYNQLFEENPI
NASGVDAKAILSARLSKSRRLENLIAQLPGEKKNGLFGNLIALSLGLTPN
FKSNFDLAEDAKLQLSKDTYDDDLDNLLAQIGDQYADLFLAAKNLSDAIL
LSDILRVNTEITKAPLSASMIKRYDEHHQDLTLLKALVRQQLPEKYKEIF
FDQSKNGYAGYIDGGASQEEFYKFIKPILEKMDGTEELLVKLNREDLLRK
QRTFDNGSIPHQIHLGELHAILRRQEDFYPFLKDNREKIEKILTFRIPYY
VGPLARGNSRFAWMTRKSEETITPWNFEEVVDKGASAQSFIERMTNFDKN
LPNEKVLPKHSLLYEYFTVYNELTKVKYVTEGMRKPAFLSGEQKKAIVDL
LFKTNRKVTVKQLKEDYFKKIECFDSVEISGVEDRFNASLGTYHDLLKII
KDKDFLDNEENEDILEDIVLTLTLFEDREMIEERLKTYAHLFDDKVMKQL
KRRRYTGWGRLSRKLINGIRDKQSGKTILDFLKSDGFANRNFMQLIHDDS
LTFKEDIQKAQVSGQGDSLHEHIANLAGSPAIKKGILQTVKVVDELVKVM
GRHKPENIVIEMARENQTTQKGQKNSRERMKRIEEGIKELGSQILKEHPV
ENTQLQNEKLYLYYLQNGRDMYVDQELDINRLSDYDVDHIVPQSFLKDDS
IDNKVLTRSDKNRGKSDNVPSEEVVKKMKNYWRQLLNAKLITQRKFDNLT
KAERGGLSELDKAGFIKRQLVETRQITKHVAQILDSRMNTKYDENDKLIR
EVKVITLKSKLVSDFRKDFQFYKVREINNYHHAHDAYLNAVVGTALIKKY
PKLESEFVYGDYKVYDVRKMIAKSEQEIGKATAKYFFYSNIMNFFKTEIT
LANGEIRKRPLIETNGETGEIVWDKGRDFATVRKVLSMPQVNIVKKTEVQ
TGGFSKESILPKRNSDKLIARKKDWDPKKYGGFDSPTVAYSVLVVAKVEK
GKSKKLKSVKELLGITIMERSSFEKNPIDFLEAKGYKEVKKDLIIKLPKY
SLFELENGRKRMLASAGELQKGNELALPSKYVNFLYLASHYEKLKGSPED
NEQKQLFVEQHKHYLDEIIEQISEFSKRVILADANLDKVLSAYNKHRDKP
IREQAENIIHLFTLTNLGAPAAFKYFDTTIDRKRYTSTKEVLDATLIHQS
ITGLYETRIDLSQLGGD

[0313] Exemplary catalytically active Cas9:

DKKYSIGLDIGTNSVGWAVITDEYKVPSKKFKVLGNTDRHSIKKNLIGAL
LFDSGETAEATRLKRTARRRYTRRKNRICYLQEIFSNEMAKVDDSFFHRL
EESFLVEEDKKHERHPIFGNIVDEVAYHEKYPTIYHLRKKLVDSTDKADL
RLIYLALAHMIKFRGHFLIEGDLNPDNSDVDKLFIQLVQTYNQLFEENPI
NASGVDAKAILSARLSKSRRLENLIAQLPGEKKNGLFGNLIALSLGLTPN
FKSNFDLAEDAKLQLSKDTYDDDLDNLLAQIGDQYADLFLAAKNLSDAIL
LSDILRVNTEITKAPLSASMIKRYDEHHQDLTLLKALVRQQLPEKYKEIF
FDQSKNGYAGYIDGGASQEEFYKFIKPILEKMDGTEELLVKLNREDLLRK
QRTFDNGSIPHQIHLGELHAILRRQEDFYPFLKDNREKIEKILTFRIPYY
VGPLARGNSRFAWMTRKSEETITPWNFEEVVDKGASAQSFIERMTNFDKN
LPNEKVLPKHSLLYEYFTVYNELTKVKYVTEGMRKPAFLSGEQKKAIVDL
LFKTNRKVTVKQLKEDYFKKIECFDSVEISGVEDRFNASLGTYHDLLKII
KDKDFLDNEENEDILEDIVLTLTLFEDREMIEERLKTYAHLFDDKVMKQL
KRRRYTGWGRLSRKLINGIRDKQSGKTILDFLKSDGFANRNFMQLIHDDS
LTFKEDIQKAQVSGQGDSLHEHIANLAGSPAIKKGILQTVKVVDELVKVM
GRHKPENIVIEMARENQTTQKGQKNSRERMKRIEEGIKELGSQILKEHPV
ENTQLQNEKLYLYYLQNGRDMYVDQELDINRLSDYDVDHIVPQSFLKDDS
IDNKVLTRSDKNRGKSDNVPSEEVVKKMKNYWRQLLNAKLITQRKFDNLT
KAERGGLSELDKAGFIKRQLVETRQITKHVAQILDSRMNTKYDENDKLIR
EVKVITLKSKLVSDFRKDFQFYKVREINNYHHAHDAYLNAVVGTALIKKY
PKLESEFVYGDYKVYDVRKMIAKSEQEIGKATAKYFFYSNIMNFFKTEIT
LANGEIRKRPLIETNGETGEIVWDKGRDFATVRKVLSMPQVNIVKKTEVQ
TGGFSKESILPKRNSDKLIARKKDWDPKKYGGFDSPTVAYSVLVVAKVEK
GKSKKLKSVKELLGITIMERSSFEKNPIDFLEAKGYKEVKKDLIIKLPKY
SLFELENGRKRMLASAGELQKGNELALPSKYVNFLYLASHYEKLKGSPED
NEQKQLFVEQHKHYLDEIIEQISEFSKRVILADANLDKVLSAYNKHRDKP
IREQAENIIHLFTLTNLGAPAAFKYFDTTIDRKRYTSTKEVLDATLIHQS
ITGLYETRIDLSQLGGD.

[0314] In some embodiments, Cas9 refers to a Cas9 from archaea (e.g. nanoarchaea), which constitute a domain and kingdom of single-celled prokaryotic microbes. In some embodiments, Cas9 refers to CasX or CasY, which have been described in, for example, Burstein et al., “New CRISPR-Cas systems from uncultivated microbes.” Cell Res. 2017 Feb. 21. doi: 10.1038/cr.2017.21, the entire contents of which is hereby incorporated by reference. Using genome-resolved metagenomics, a number of CRISPR-Cas systems were identified, including the first reported Cas9 in the archaeal domain of life. This divergent Cas9 protein was found in little-studied nanoarchaea as part of an active CRISPR-Cas system. In bacteria, two previously unknown systems were discovered, CRISPR-CasX and CRISPR-CasY, which are among the most compact systems yet discovered. In some embodiments, Cas9 refers to CasX, or a variant of CasX. In some embodiments, Cas9 refers to a CasY, or a variant of CasY. It should be appreciated that other RNA-guided DNA binding proteins may be used as a nucleic acid programmable DNA binding protein (napDNAbp), and are within the scope of this disclosure.

[0315] In some embodiments, the nucleic acid programmable DNA binding protein (napDNAbp) or any of the fusion proteins provided herein may be a CasX or CasY protein. In some embodiments, the napDNAbp is a CasX protein. In some embodiments, the napDNAbp is a CasY protein. In some embodiments, the napDNAbp comprises an amino acid sequence that is at least 85%, at least 90%, at least 91%, at least 92%, at least 93%, at least 94%, at least 95%, at least 96%, at least 97%, at least 98%, at least 99%, or at ease 99.5% identical to a naturally-occurring CasX or CasY protein. In some embodiments, the napDNAbp is a naturally-occurring CasX or CasY protein. In some embodiments, the napDNAbp comprises an amino acid sequence that is at least 85%, at least 90%, at least 91%, at least 92%, at least 93%, at least 94%, at least 95%, at least 96%, at least 97%, at least 98%, at least 99%, or at ease 99.5% identical to any CasX or CasY protein described herein. It should be appreciated that CasX and CasY from other bacterial species may also be used in accordance with the present disclosure.

[0316] CasX (uniprot.org/uniprot/FONN87; uniprot.org/uniprot/FONH53)

[0317] >tr|F0NN87|F0NN87_SULIH CRISPR-associated Casx protein OS=Sulfolobus islandicus (strain HVE10/4) GN=SiH_0402 PE=4 SV=1

MEVPLYNIFGDNYIIQVATEAENSTIYNNKVEIDDEELRNVLNLAYKIAK
NNEDAAAERRGKAKKKKGEEGETTTSNIILPLSGNDKNPWTETLKCYNFP
TTVALSEVFKNFSQVKECEEVSAPSFVKPEFYEFGRSPGMVERTRRVKLE
VEPHYLIIAAAGWVLTRLGKAKVSEGDYVGVNVFTPTRGILYSLIQNVNG
IVPGIKPETAFGLWIARKVVSSVTNPNVSVVRIYTISDAVGQNPTTINGG
FSIDLTKLLEKRYLLSERLEAIARNALSISSNMRERYIVLANYIYEYLTG
SKRLEDLLYFANRDLIMNLNSDDGKVRDLKLISAYVNGELIRGEG

[0318] >tr|F0NH₅₃|F0NH₅₃_SULIR CRISPR associated protein, Casx OS=Sulfolobus islandicus (strain REY15A) GN=SiRe_0771 PE=4 SV=1

MEVPLYNIFGDNYIIQVATEAENSTIYNNKVEIDDEELRNVLNLAYKIAK
NNEDAAAERRGKAKKKKGEEGETTTSNIILPLSGNDKNPWTETLKCYNFP
TTVALSEVFKNFSQVKECEEVSAPSFVKPEFYKFGRSPGMVERTRRVKLE
VEPHYLIMAAAGWVLTRLGKAKVSEGDYVGVNVFTPTRGILYSLIQNVNG
IVPGIKPETAFGLWIARKVVSSVTNPNVSVVSIYTISDAVGQNPTTINGG
FSIDLTKLLEKRDLLSERLEAIARNALSISSNMRERYIVLANYIYEYLTG
SKRLEDLLYFANRDLIMNLNSDDGKVRDLKLISAYVNGELIRGEG

[0319] CasY (ncbi.nlm.nih.gov/protein/APG80656.1)

[0320] >APG80656.1 CRISPR-associated protein CasY [uncultured Parcubacteria group bacterium]

MSKRHPRISGVKGYRLHAQRLEYTGKSGAMRTIKYPLYSSPSGGRTVPRE
IVSAINDDYVGLYGLSNFDDLYNAEKRNEEKVYSVLDFWYDCVQYGAVFS
YTAPGLLKNVAEVRGGSYELTKTLKGSHLYDELQIDKVIKFLNKKEISRA
NGSLDKLKKDIIDCFKAEYRERHKDQCNKLADDIKNAKKDAGASLGERQK
KLFRDFFGISEQSENDKPSFTNPLNLTCCLLPFDTVNNNRNRGEVLFNKL
KEYAQKLDKNEGSLEMWEYIGIGNSGTAFSNFLGEGFLGRLRENKITELK
KAMMDITDAWRGQEQEEELEKRLRILAALTIKLREPKFDNHWGGYRSDIN
GKLSSWLQNYINQTVKIKEDLKGHKKDLKKAKEMINRFGESDTKEEAVVS
SLLESIEKIVPDDSADDEKPDIPAIAIYRRFLSDGRLTLNRFVQREDVQE
ALIKERLEAEKKKKPKKRKKKSDAEDEKETIDFKELFPHLAKPLKLVPNF
YGDSKRELYKKYKNAAIYTDALWKAVEKIYKSAFSSSLKNSFFDTDFDKD
FFIKRLQKIFSVYRRFNTDKWKPIVKNSFAPYCDIVSLAENEVLYKPKQS
RSRKSAAIDKNRVRLPSTENIAKAGIALARELSVAGFDWKDLLKKEEHEE
YIDLIELHKTALALLLAVTETQLDISALDFVENGTVKDFMKTRDGNLVLE
GRFLEMFSQSIVFSELRGLAGLMSRKEFITRSAIQTMNGKQAELLYIPHE
FQSAKITTPKEMSRAFLDLAPAEFATSLEPESLSEKSLLKLKQMRYYPHY
FGYELTRTGQGIDGGVAENALRLEKSPVKKREIKCKQYKTLGRGQNKIVL
YVRSSYYQTQFLEWFLHRPKNVQTDVAVSGSFLIDEKKVKTRWNYDALTV
ALEPVSGSERVFVSQPFTIFPEKSAEEEGQRYLGIDIGEYGIAYTALEIT
GDSAKILDQNFISDPQLKTLREEVKGLKLDQRRGTFAMPSTKIARIRESL
VHSLRNRIHHLALKHKAKIVYELEVSRFEEGKQKIKKVYATLKKADVYSE
IDADKNLQTTVWGKLAVASEISASYTSQFCGACKKLWRAEMQVDETITTQ
ELIGTVRVIKGGTLIDAIKDFMRPPIFDENDTPFPKYRDFCDKHHISKKM
RGNSCLFICPFCRANADADIQASQTIALLRYVKEEKKVEDYFERFRKLKN
IKVLGQMKKI

[0321] The term “Cas12b” or “Cas12b domain” refers to an RNA-guided nuclease comprising a Cas12b/C2c1 protein, or a fragment thereof (e.g., a protein comprising an active, inactive, or partially active DNA cleavage domain of Cas12b, and/or the gRNA binding domain of Cas12b). contents of each of which are incorporated herein by reference). Cas12b orthologs have been described in various species, including, but not limited to, Alicyclobacillus acidoterrestris, Alicyclobacillus acidophilus (Teng et al., Cell Discov. 2018 Nov. 27; 4:63), Bacillus hisashi, and Bacillus sp. V3-13. Additional suitable Cas12b nucleases and sequences will be apparent to those of skill in the art based on this disclosure.

[0322] In some embodiments, proteins comprising Cas12b or fragments thereof are referred to as “Cas12b variants.” A Cas12b variant shares homology to Cas12b, or a fragment thereof. For example, a Cas12b variant is at least about 70% identical, at least about 80% identical, at least about 90% identical, at least about 95% identical, at least about 96% identical, at least about 97% identical, at least about 98% identical, at least about 99% identical, at least about 99.5% identical, or at least about 99.9% identical to wild type Cas12b. In some embodiments, the Cas12b variant may have 1, 2, 3, 4, 5, 6, 7, 8, 9, 10, 11, 12, 13, 14, 15, 16, 17, 18, 19, 20, 21, 22, 21, 24, 25, 26, 27, 28, 29, 30, 31, 32, 33, 34, 35, 36, 37, 38, 39, 40, 41, 42, 43, 44, 45, 46, 47, 48, 49, 50 or more amino acid changes compared to wild type Cas12b. In some embodiments, the Cas12b variant comprises a fragment of Cas12b (e.g., a gRNA binding domain or a DNA-cleavage domain), such that the fragment is at least about 70% identical, at least about 80% identical, at least about 90% identical, at least about 95% identical, at least about 96% identical, at least about 97% identical, at least about 98% identical, at least about 99% identical, at least about 99.5% identical, or at least about 99.9% identical to the corresponding fragment of wild type Cas12b. In some embodiments, the fragment is at least 30%, at least 35%, at least 40%, at least 45%, at least 50%, at least 55%, at least 60%, at least 65%, at least 70%, at least 75%, at least 80%, at least 85%, at least 90%, at least 95% identical, at least 96%, at least 97%, at least 98%, at least 99%, or at least 99.5% of the amino acid length of a corresponding wild type Cas12b. Exemplary Cas12b polypeptides are listed below.

[0323] Cas12b/C2c1 (uniprot.org/uniprot/TOD7A2#2)

[0324] sp|TOD7A2├C2C1_ALIAG CRISPR-associated endo-nuclease C2c1 OS=Alicyclobacillus acido-terrestris (strain ATCC 49025/DSM 3922/CIP 106132/NCIMB 13137/GD3B) GN=c2c1 PE=1 SV=1

MAVKSIKVKLRLDDMPEIRAGLWKLHKEVNAGVRYYTEWLSLLRQENLYR
RSPNGDGEQECDKTAEECKAELLERLRARQVENGHRGPAGSDDELLQLAR
QLYELLVPQAIGAKGDAQQIARKFLSPLADKDAVGGLGIAKAGNKPRWVR
MREAGEPGWEEEKEKAETRKSADRTADVLRALADFGLKPLMRVYTDSEMS
SVEWKPLRKGQAVRTWDRDMFQQAIERMMSWESWNQRVGQEYAKLVEQKN
RFEQKNFVGQEHLVHLVNQLQQDMKEASPGLESKEQTAHYVTGRALRGSD
KVFEKWGKLAPDAPFDLYDAEIKNVQRRNTRRFGSHDLFAKLAEPEYQAL
WREDASFLTRYAVYNSILRKLNHAKMFATFTLPDATAHPIWTRFDKLGGN
LHQYTFLFNEFGERRHAIRFHKLLKVENGVAREVDDVTVPISMSEQLDNL
LPRDPNEPIALYFRDYGAEQHFTGEFGGAKIQCRRDQLAHMHRRRGARDV
YLNVSVRVQSQSEARGERRPPYAAVFRLVGDNHRAFVHFDKLSDYLAEHP
DDGKLGSEGLLSGLRVMSVDLGLRTSASISVFRVARKDELKPNSKGRVPF
FFPIKGNDNLVAVHERSQLLKLPGETESKDLRAIREERQRTLRQLRTQLA
YLRLLVRCGSEDVGRRERSWAKLIEQPVDAANHMTPDWREAFENELQKLK
SLHGICSDKEWMDAVYESVRRVWRHMGKQVRDWRKDVRSGERPKIRGYAK
DVVGGNSIEQIEYLERQYKFLKSWSFFGKVSGQVIRAEKGSRFAITLREH
IDHAKEDRLKKLADRIIMEALGYVYALDERGKGKWVAKYPPCQLILLEEL
SEYQFNNDRPPSENNQLMQWSHRGVFQELINQAQVHDLLVGTMYAAFSSR
FDARTGAPGIRCRRVPARCTQEHNPEPFPWWLNKFVVEHTLDACPLRADD
LIPTGEGEIFVSPFSAEEGDFHQIHADLNAAQNLQQRLWSDFDISQIRLR
CDWGEVDGELVLIPRLTGKRTADSYSNKVFYTNTGVTYYERERGKKRRKV
FAQEKLSEEEAELLVEADEAREKSVVLMRDPSGIINRGNWTRQKEFWSMV
NQRIEGYLVKQIRSRVPLQDSACENTGDI

[0325] AacCas12b (Alicyclobacillus acidiphilus)—WP_067623834

MAVKSMKVKLRLDNMPEIRAGLWKLHTEVNAGVRYYTEWLSLLRQENLYR
RSPNGDGEQECYKTAEECKAELLERLRARQVENGHCGPAGSDDELLQLAR
QLYELLVPQAIGAKGDAQQIARKFLSPLADKDAVGGLGIAKAGNKPRWVR
MREAGEPGWEEEKAKAEARKSTDRTADVLRALADFGLKPLMRVYTDSDMS
SVQWKPLRKGQAVRTWDRDMFQQAIERMMSWESWNQRVGEAYAKLVEQKS
RFEQKNFVGQEHLVQLVNQLQQDMKEASHGLESKEQTAHYLTGRALRGSD
KVFEKWEKLDPDAPFDLYDTEIKNVQRRNTRRFGSHDLFAKLAEPKYQAL
WREDASFLTRYAVYNSIVRKLNHAKMFATFTLPDATAHPIWTRFDKLGGN
LHQYTFLFNEFGEGRHAIRFQKLLTVEDGVAKEVDDVTVPISMSAQLDDL
LPRDPHELVALYFQDYGAEQHLAGEFGGAKIQYRRDQLNHLHARRGARDV
YLNLSVRVQSQSEARGERRPPYAAVFRLVGDNHRAFVHFDKLSDYLAEHP
DDGKLGSEGLLSGLRVMSVDLGLRTSASISVFRVARKDELKPNSEGRVPF
CFPIEGNENLVAVHERSQLLKLPGETESKDLRAIREERQRTLRQLRTQLA
YLRLLVRCGSEDVGRRERSWAKLIEQPMDANQMTPDWREAFEDELQKLKS
LYGICGDREWTEAVYESVRRVWRHMGKQVRDWRKDVRSGERPKIRGYQKD
VVGGNSIEQIEYLERQYKFLKSWSFFGKVSGQVIRAEKGSRFAITLREHI
DHAKEDRLKKLADRIIMEALGYVYALDDERGKGKWVAKYPPCQLILLEEL
SEYQFNNDRPPSENNQLMQWSHRGVFQELLNQAQVHDLLVGTMYAAFSSR
FDARTGAPGIRCRRVPARCAREQNPEPFPWWLNKFVAEHKLDGCPLRADD
LIPTGEGEFFVSPFSAEEGDFHQIHADLNAAQNLQRRLWSDFDISQIRLR
CDWGEVDGEPVLIPRTTGKRTADSYGNKVFYTKTGVTYYERERGKKRRKV
FAQEELSEEEAELLVEADEAREKSVVLMRDPSGIINRGDWTRQKEFWSMV
NQRIEGYLVKQIRSRVRLQESACENTGDI

[0326] BhCas12b (Bacillus hisashii) NCBI Reference Sequence: WP_095142515

MAPKKKRKVGIHGVPAAATRSFILKIEPNEEVKKGLWKTHEVLNHGIAYY
MNILKLIRQEAIYEHHEQDPKNPKKVSKAEIQAELWDFVLKMQKCNSFTH
EVDKDEVFNILRELYEELVPSSVEKKGEANQLSNKFLYPLVDPNSQSGKG
TASSGRKPRWYNLKIAGDPSWEEEKKKWEEDKKKDPLAKILGKLAEYGLI
PLFIPYTDSNEPIVKEIKWMEKSRNQSVRRLDKDMFIQALERFLSWESWN
LKVKEEYEKVEKEYKTLEERIKEDIQALKALEQYEKERQEQLLRDTLNTN
EYRLSKRGLRGWREIIQKWLKMDENEPSEKYLEVFKDYQRKHPREAGDYS
VYEFLSKKENHFIWRNHPEYPYLYATFCEIDKKKKDAKQQATFTLADPIN
HPLWVRFEERSGSNLNKYRILTEQLHTEKLKKKLTVQLDRLIYPTESGGW
EEKGKVDIVLLPSRQFYNQIFLDIEEKGKHAFTYKDESIKFPLKGTLGGA
RVQFDRDHLRRYPHKVESGNVGRIYFNMTVNIEPTESPVSKSLKIHRDDF
PKVVNFKPKELTEWIKDSKGKKLKSGIESLEIGLRVMSIDLGQRQAAAAS
IFEVVDQKPDIEGKLFFPIKGTELYAVHRASFNIKLPGETLVKSREVLRK
AREDNLKLMNQKLNFLRNVLHFQQFEDITEREKRVTKWISRQENSDVPLV
YQDELIQIRELMYKPYKDWVAFLKQLHKRLEVEIGKEVKHWRKSLSDGRK
GLYGISLKNIDEIDRTRKFLLRWSLRPTEPGEVRRLEPGQRFAIDQLNHL
NALKEDRLKKMANTIIMHALGYCYDVRKKKWQAKNPACQIILFEDLSNYN
PYEERSRFENSKLMKWSRREIPRQVALQGEIYGLQVGEVGAQFSSRFHAK
TGSPGIRCSVVTKEKLQDNRFFKNLQREGRLTLDKIAVLKEGDLYPDKGG
EKFISLSKDRKCVTTHADINAAQNLQKRFWTRTHGFYKVYCKAYQVDGQT
VYIPESKDQKQKIIEEFGEGYFILKDGVYEWVNAGKLKIKKGSSKQSSSE
LVDSDILKDSFDLASELKGEKLMLYRDPSGNVFPSDKWMAAGVFFGKLER
ILISKLTNQYSISTIEDDSSKQSMKRPAATKKAGQAKKKK

including the variant termed BvCas12b V4 (S893R/K846R/E837G changes rel. to wt above)

[0327] BvCas12b (Bacillus sp. V3-13) NCBI Reference Sequence: WP_101661451.1

MAIRSIKLKMKTNSGTDSIYLRKALWRTHQLINEGIAYYMNLLTLYRQEA
IGDKTKEAYQAELINIIRNQQRNNGSSEEHGSDQEILALLRQLYELIIPS
SIGESGDANQLGNKFLYPLVDPNSQSGKGTSNAGRKPRWKRLKEEGNPDW
ELEKKKDEERKAKDPTVKIFDNLNKYGLLPLFPLFTNIQKDIEWLPLGKR
QSVRKWDKDMFIQAIERLLSWESWNRRVADEYKQLKEKTESYYKEHLTGG
EEWIEKIRKFEKERNMELEKNAFAPNDGYFITSRQIRGWDRVYEKWSKLP
ESASPEELWKVVAEQQNKMSEGFGDPKVFSFLANRENRDIWRGHSERIYH
IAAYNGLQKKLSRTKEQATFTLPDAIEHPLWIRYESPGGTNLNLFKLEEK
QKKNYYVTLSKIIWPSEEKWIEKENIEIPLAPSIQFNRQIKLKQHVKGKQ
EISFSDYSSRISLDGVLGGSRIQFNRKYIKNHKELLGEGDIGPVFFNLVV
DVAPLQETRNGRLQSPIGKALKVISSDFSKVIDYKPKELMDWMNTGSASN
SFGVASLLEGMRVMSIDMGQRTSASVSIFEVVKELPKDQEQKLFYSINDT
ELFAIHKRSFLLNLPGEVVTKNNKQQRQERRKKRQFVRSQIRMLANVLRL
ETKKTPDERKKAIHKLMEIVQSYDSWTASQKEVWEKELNLLTNMAAFNDE
IWKESLVELHHRIEPYVGQIVSKWRKGLSEGRKNLAGISMWNIDELEDTR
RLLISWSKRSRTPGEANRIETDEPFGSSLLQHIQNVKDDRLKQMANLIIM
TALGFKYDKEEKDRYKRWKETYPACQIILFENLNRYLFNLDRSRRENSRL
MKWAHRSIPRTVSMQGEMFGLQVGDVRSEYSSRFHAKTGAPGIRCHALTE
EDLKAGSNTLKRLIEDGFINESELAYLKKGDIIPSQGGELFVTLSKRYKK
DSDNNELTVIHADINAAQNLQKRFWQQNSEVYRVPCQLARMGEDKLYIPK
SQTETIKKYFGKGSFVKNNTEQEVYKWEKSEKMKIKTDTTFDLQDLDGFE
DISKTIELAQEQQKKYLTMFRDPSGYFFNNETWRPQKEYWSIVNNIIKSC
LKKKILSNKVEL

[0328] By “Cbl proto-oncogene B (CBLB) polypeptide” is meant a protein having at least about 85% amino acid sequence identity to GenBank Accession No. ABC86700.1 or a fragment thereof that is involved in the regulation of immune responses. An exemplary CBLB polypeptide sequence is provided below.

[0329] >ABC86700.1 CBL-B [Homo sapiens]

MANSMNGRNPGGRGGNPRKGRILGIIDAIQDAVGPPKQAAADRRTVEKT
WKLMDKVVRLCQNPKLQLKNSPPYILDILPDTYQHLRLILSKYDDNQKL
AQLSENEYFKIYIDSLMKKSKRAIRLFKEGKERMYEEQSQDRRNLTKLS
LIFSHMLAEIKAIFPNGQFQGDNFRITKADAAEFWRKFFGDKTIVPWKV
FRQCLHEVHQISSGLEAMALKSTIDLTCNDYISVFEFDIFTRLFQPWGS
ILRNWNFLAVTHPGYMAFLTYDEVKARLQKYSTKPGSYIFRLSCTRLGQ
WAIGYVTGDGNILQTIPHNKPLFQALIDGSREGFYLYPDGRSYNPDLTG
LCEPTPHDHIKVTQEQYELYCEMGSTFQLCKICAENDKDVKIEPCGHLM
CTSCLTAWQESDGQGCPFCRCEIKGTEPIIVDPFDPRDEGSRCCSIIDP
FGMPMLDLDDDDDREESLMMNRLANVRKCTDRQNSPVTSPGSSPLAQRR
KPQPDPLQIPHLSLPPVPPRLDLIQKGIVRSPCGSPTGSPKSSPCMVRK
QDKPLPAPPPPLRDPPPPPPERPPPIPPDNRLSRHIHHVESVPSRDPPM
PLEAWCPRDVFGTNQLVGCRLLGEGSPKPGITASSNVNGRHSRVGSDPV
LMRKHRRHDLPLEGAKVFSNGHLGSEEYDVPPRLSPPPPVTTLLPSIKC
TGPLANSLSEKTRDPVEEDDDEYKIPSSHPVSLNSQPSHCHNVKPPVRS
CDNGHCMLNGTHGPSSEKKSNIPDLSIYLKGDVFDSASDPVPLPPARPP
TRDNPKHGSSLNRTPSDYDLLIPPLGEDAFDALPPSLPPPPPPARHSLI
EHSKPPGSSSRPSSGQDLFLLPSDPFVDLASGQVPLPPARRLPGENVKT
NRTSQDYDQLPSCSDGSQAPARPPKPRPRRTAPEIHHRKPHGPEAALEN
VDAKIAKLMGEGYAFEEVKRALEIAQNNVEVARSILREFAFPPPVSPRL
NL

[0330] By “Cbl proto-oncogene B (CBLB) polynucleotide” is meant a nucleic acid molecule encoding a CBLB polypeptide. The CBLB gene encodes an E3 ubiquitin ligase. An exemplary CBLB nucleic acid sequence is provided below. Additional exemplary CBLB genomic sequences are indicated in NCBI Reference Sequence: NC_000003.12, or transcript reference NM_001321813.1.

>DQ349203.1 Homo sapiens CBL-B mRNA, complete cds

ATGGCAAACTCAATGAATGGCAGAAACCCTGGTGGTCGAGGAGGAAATC
CCCGAAAAGGTCGAATTTTGGGTATTATTGATGCTATTCAGGATGCAGT
TGGACCCCCTAAGCAAGCTGCCGCAGATCGCAGGACCGTGGAGAAGACT
TGGAAGCTCATGGACAAAGTGGTAAGACTGTGCCAAAATCCCAAACTTC
AGTTGAAAAATAGCCCACCATATATACTTGATATTTTGCCTGATACATA
TCAGCATTTACGACTTATATTGAGTAAATATGATGACAACCAGAAACTT
GCCCAACTCAGTGAGAATGAGTACTTTAAAATCTACATTGATAGCCTTA
TGAAAAAGTCAAAACGGGCAATAAGACTCTTTAAAGAAGGCAAGGAGAG
AATGTATGAAGAACAGTCACAGGACAGACGAAATCTCACAAAACTGTCC
CTTATCTTCAGTCACATGCTGGCAGAAATCAAAGCAATCTTTCCCAATG
GTCAATTCCAGGGAGATAACTTTCGTATCACAAAAGCAGATGCTGCTGA
ATTCTGGAGAAAGTTTTTTGGAGACAAAACTATCGTACCATGGAAAGTA
TTCAGACAGTGCCTTCATGAGGTCCACCAGATTAGCTCTGGCCTGGAAG
CAATGGCTCTAAAATCAACAATTGATTTAACTTGCAATGATTACATTTC
AGTTTTTGAATTTGATATTTTTACCAGGCTGTTTCAGCCTTGGGGCTCT
ATTTTGCGGAATTGGAATTTCTTAGCTGTGACACATCCAGGTTACATGG
CATTTCTCACATATGATGAAGTTAAAGCACGACTACAGAAATATAGCAC
CAAACCCGGAAGCTATATTTTCCGGTTAAGTTGCACTCGATTGGGACAG
TGGGCCATTGGCTATGTGACTGGGGATGGGAATATCTTACAGACCATAC
CTCATAACAAGCCCTTATTTCAAGCCCTGATTGATGGCAGCAGGGAAGG
ATTTTATCTTTATCCTGATGGGAGGAGTTATAATCCTGATTTAACTGGA
TTATGTGAACCTACACCTCATGACCATATAAAAGTTACACAGGAACAAT
ATGAATTATATTGTGAAATGGGCTCCACTTTTCAGCTCTGTAAGATTTG
TGCAGAGAATGACAAAGATGTCAAGATTGAGCCTTGTGGGCATTTGATG
TGCACCTCTTGCCTTACGGCATGGCAGGAGTCGGATGGTCAGGGCTGCC
CTTTCTGTCGTTGTGAAATAAAAGGAACTGAGCCCATAATCGTGGACCC
CTTTGATCCAAGAGATGAAGGCTCCAGGTGTTGCAGCATCATTGACCCC
TTTGGCATGCCGATGCTAGACTTGGACGACGATGATGATCGTGAGGAGT
CCTTGATGATGAATCGGTTGGCAAACGTCCGAAAGTGCACTGACAGGCA
GAACTCACCAGTCACATCACCAGGATCCTCTCCCCTTGCCCAGAGAAGA
AAGCCACAGCCTGACCCACTCCAGATCCCACATCTAAGCCTGCCACCCG
TGCCTCCTCGCCTGGATCTAATTCAGAAAGGCATAGTTAGATCTCCCTG
TGGCAGCCCAACGGGTTCACCAAAGTCTTCTCCTTGCATGGTGAGAAAA
CAAGATAAACCACTCCCAGCACCACCTCCTCCCTTAAGAGATCCTCCTC
CACCGCCACCTGAAAGACCTCCACCAATCCCACCAGACAATAGACTGAG
TAGACACATCCATCATGTGGAAAGCGTGCCTTCCAGAGACCCGCCAATG
CCTCTTGAAGCATGGTGCCCTCGGGATGTGTTTGGGACTAATCAGCTTG
TGGGATGTCGACTCCTAGGGGAGGGCTCTCCAAAACCTGGAATCACAGC
GAGTTCAAATGTCAATGGAAGGCACAGTAGAGTGGGCTCTGACCCAGTG
CTTATGCGGAAACACAGACGCCATGATTTGCCTTTAGAAGGAGCTAAGG
TCTTTTCCAATGGTCACCTTGGAAGTGAAGAATATGATGTTCCTCCCCG
GCTTTCTCCTCCTCCTCCAGTTACCACCCTCCTCCCTAGCATAAAGTGT
ACTGGTCCGTTAGCAAATTCTCTTTCAGAGAAAACAAGAGACCCAGTAG
AGGAAGATGATGATGAATACAAGATTCCTTCATCCCACCCTGTTTCCCT
GAATTCACAACCATCTCATTGTCATAATGTAAAACCTCCTGTTCGGTCT
TGTGATAATGGTCACTGTATGCTGAATGGAACACATGGTCCATCTTCAG
AGAAGAAATCAAACATCCCTGACTTAAGCATATATTTAAAGGGAGATGT
TTTTGATTCAGCCTCTGATCCCGTGCCATTACCACCTGCCAGGCCTCCA
ACTCGGGACAATCCAAAGCATGGTTCTTCACTCAACAGGACGCCCTCTG
ATTATGATCTTCTCATCCCTCCATTAGGTGAAGATGCTTTTGATGCCCT
CCCTCCATCTCTCCCACCTCCCCCACCTCCTGCAAGGCATAGTCTCATT
GAACATTCAAAACCTCCTGGCTCCAGTAGCCGGCCATCCTCAGGACAGG
ATCTTTTTCTTCTTCCTTCAGATCCCTTTGTTGATCTAGCAAGTGGCCA
AGTTCCTTTGCCTCCTGCTAGAAGGTTACCAGGTGAAAATGTCAAAACT
AACAGAACATCACAGGACTATGATCAGCTTCCTTCATGTTCAGATGGTT
CACAGGCACCAGCCAGACCCCCTAAACCACGACCGCGCAGGACTGCACC
AGAAATTCACCACAGAAAACCCCATGGGCCTGAGGCGGCATTGGAAAAT
GTCGATGCAAAAATTGCAAAACTCATGGGAGAGGGTTATGCCTTTGAAG
AGGTGAAGAGAGCCTTAGAGATAGCCCAGAATAATGTCGAAGTTGCCCG
GAGCATCCTCCGAGAATTTGCCTTCCCTCCTCCAGTATCCCCACGTCTA
AATCTATAG

[0331] By “chimeric antigen receptor” is meant a synthetic receptor comprising an extracellular antigen binding domain, a transmembrane domain, and an intracellular signaling domain that confers specificity for an antigen onto an immune cell.

[0332] In this disclosure, “comprises,” “comprising,” “containing” and “having” and the like can have the meaning ascribed to them in U.S. Patent law and can mean “includes,” “including,” and the like; “consisting essentially of” or “consists essentially” likewise has the meaning ascribed in U.S. Patent law and the term is open-ended, allowing for the presence of more than that which is recited so long as basic or novel characteristics of that which is recited is not changed by the presence of more than that which is recited, but excludes prior art embodiments.

[0333] By “cluster of differentiation 2 (CD2)” is meant a protein having at least about 85% amino acid sequence identity to NCBI Accession No. NP_001315538.1 or fragment thereof and having immunomodulatory activity. An exemplary amino acid sequence is provided below.

>NP_001315538.1 T-cell surface antigen CD2 isoform 1 precursor [Homo sapiens]

MSFPCKFVASFLLIFNVSSKGAVSKEITNALETWGALGQDINLDIPSFQ
MSDDIDDIKWEKTSDKKKIAQFRKEKETFKEKDTYKLFKNGTLKIKHLK
TDDQDIYKVSIYDTKGKNVLEKIFDLKIQERVSKPKISWTCINTTLTCE
VMNGTDPELNLYQDGKHLKLSQRVITHKWTTSLSAKFKCTAGNKVSKES
SVEPVSCPGGSILGQSNGLSAWTPPSHPTSLPFAEKGLDIYLIIGICGG
GSLLMVFVALLVFYITKRKKQRSRRNDEELETRAHRVATEERGRKPHQI
PASTPQNPATSQHPPPPPGHRSQAPSHRPPPPGHRVQHQPQKRPPAPSG
TQVHQQKGPPLPRPRVQPKPPHGAAENSLSPSSN

[0334] By “cluster of differentiation 2 (CD2)” is meant a nucleic acid encoding a CD2 polypeptide. An exemplary CD2 nucleic acid sequence is provided below. >NM_001328609.2 Homo sapiens CD2 molecule (CD2), transcript variant 1, mRNA

AGTCTCACTTCAGTTCCTTTTGCATGAAGAGCTCAGAATCAAAAGAGG
AAACCAACCCCTAAGATGAGCTTTCCATGTAAATTTGTAGCCAGCTTC
CTTCTGATTTTCAATGTTTCTTCCAAAGGTGCAGTCTCCAAAGAGATT
ACGAATGCCTTGGAAACCTGGGGTGCCTTGGGTCAGGACATCAACTTG
GACATTCCTAGTTTTCAAATGAGTGATGATATTGACGATATAAAATGG
GAAAAAACTTCAGACAAGAAAAAGATTGCACAATTCAGAAAAGAGAAA
GAGACTTTCAAGGAAAAAGATACATATAAGCTATTTAAAAATGGAACT
CTGAAAATTAAGCATCTGAAGACCGATGATCAGGATATCTACAAGGTA
TCAATATATGATACAAAAGGAAAAAATGTGTTGGAAAAAATATTTGAT
TTGAAGATTCAAGAGAGGGTCTCAAAACCAAAGATCTCCTGGACTTGT
ATCAACACAACCCTGACCTGTGAGGTAATGAATGGAACTGACCCCGAA
TTAAACCTGTATCAAGATGGGAAACATCTAAAACTTTCTCAGAGGGTC
ATCACACACAAGTGGACCACCAGCCTGAGTGCAAAATTCAAGTGCACA
GCAGGGAACAAAGTCAGCAAGGAATCCAGTGTCGAGCCTGTCAGCTGT
CCAGGAGGCAGCATCCTTGGCCAGAGTAATGGGCTCTCTGCCTGGACC
CCTCCCAGCCATCCCACTTCTCTTCCTTTTGCAGAGAAAGGTCTGGAC
ATCTATCTCATCATTGGCATATGTGGAGGAGGCAGCCTCTTGATGGTC
TTTGTGGCACTGCTCGTTTTCTATATCACCAAAAGGAAAAAACAGAGG
AGTCGGAGAAATGATGAGGAGCTGGAGACAAGAGCCCACAGAGTAGCT
ACTGAAGAAAGGGGCCGGAAGCCCCACCAAATTCCAGCTTCAACCCCT
CAGAATCCAGCAACTTCCCAACATCCTCCTCCACCACCTGGTCATCGT
TCCCAGGCACCTAGTCATCGTCCCCCGCCTCCTGGACACCGTGTTCAG
CACCAGCCTCAGAAGAGGCCTCCTGCTCCGTCGGGCACACAAGTTCAC
CAGCAGAAAGGCCCGCCCCTCCCCAGACCTCGAGTTCAGCCAAAACCT
CCCCATGGGGCAGCAGAAAACTCATTGTCCCCTTCCTCTAATTAAAAA
AGATAGAAACTGTCTTTTTCAATAAAAAGCACTGTGGATTTCTGCCCT
CCTGATGTGCATATCCGTACTTCCATGAGGTGTTTTCTGTGTGCAGAA
CATTGTCACCTCCTGAGGCTGTGGGCCACAGCCACCTCTGCATCTTCG
AACTCAGCCATGTGGTCAACATCTGGAGTTTTTGGTCTCCTCAGAGAG
CTCCATCACACCAGTAAGGAGAAGCAATATAAGTGTGATTGCAAGAAT
GGTAGAGGACCGAGCACAGAAATCTTAGAGATTTCTTGTCCCCTCTCA
GGTCATGTGTAGATGCGATAAATCAAGTGATTGGTGTGCCTGGGTCTC
ACTACAAGCAGCCTATCTGCTTAAGAGACTCTGGAGTTTCTTATGTGC
CCTGGTGGACACTTGCCCACCATCCTGTGAGTAAAAGTGAAATAAAAG
CTTTGACTAGA

[0335] By “cluster of differentiation 3 epsilon (CD3e or CD3 epsilon)” is meant a protein having at least about 85% amino acid sequence identity to NCBI Accession No. NP_000724.1 or fragment thereof and having immunomodulatory activity. An exemplary amino acid sequence is provided below.

>NP_000724.1 T-cell surface glycoprotein CD3 epsilon chain precursor [Homo sapiens]

MQSGTHWRVLGLCLLSVGVWGQDGNEEMGGITQTPYKVSISGTTVILTC
PQYPGSEILWQHNDKNIGGDEDDKNIGSDEDHLSLKEFSELEQSGYYVC
YPRGSKPEDANFYLYLRARVCENCMEMDVMSVATIVIVDICITGGLLLL
VYYWSKNRKAKAKPVTRGAGAGGRQRGQNKERPPPVPNPDYEPIRKGQR
DLYSGLNQRRI

[0336] By “cluster of differentiation 3 epsilon (CD3e or CD3 epsilon)” is meant a nucleic acid encoding a CD3e polypeptide. An exemplary CD3e nucleic acid sequence is provided below.

>NM_000733.4 Homo sapiens CD3e molecule (CD3E), mRNA

AGAAACCCTCCTCCCCTCCCAGCCTCAGGTGCCTGCTTCAGAAAATGAA
GTAGTAAGTCTGCTGGCCTCCGCCATCTTAGTAAAGTAACAGTCCCATG
AAACAAAGATGCAGTCGGGCACTCACTGGAGAGTTCTGGGCCTCTGCCT
CTTATCAGTTGGCGTTTGGGGGCAAGATGGTAATGAAGAAATGGGTGGT
ATTACACAGACACCATATAAAGTCTCCATCTCTGGAACCACAGTAATAT
TGACATGCCCTCAGTATCCTGGATCTGAAATACTATGGCAACACAATGA
TAAAAACATAGGCGGTGATGAGGATGATAAAAACATAGGCAGTGATGAG
GATCACCTGTCACTGAAGGAATTTTCAGAATTGGAGCAAAGTGGTTATT
ATGTCTGCTACCCCAGAGGAAGCAAACCAGAAGATGCGAACTTTTATCT
CTACCTGAGGGCAAGAGTGTGTGAGAACTGCATGGAGATGGATGTGATG
TCGGTGGCCACAATTGTCATAGTGGACATCTGCATCACTGGGGGCTTGC
TGCTGCTGGTTTACTACTGGAGCAAGAATAGAAAGGCCAAGGCCAAGCC
TGTGACACGAGGAGCGGGTGCTGGCGGCAGGCAAAGGGGACAAAACAAG
GAGAGGCCACCACCTGTTCCCAACCCAGACTATGAGCCCATCCGGAAAG
GCCAGCGGGACCTGTATTCTGGCCTGAATCAGAGACGCATCTGACCCTC
TGGAGAACACTGCCTCCCGCTGGCCCAGGTCTCCTCTCCAGTCCCCCTG
CGACTCCCTGTTTCCTGGGCTAGTCTTGGACCCCACGAGAGAGAATCGT
TCCTCAGCCTCATGGTGAACTCGCGCCCTCCAGCCTGATCCCCCGCTCC
CTCCTCCCTGCCTTCTCTGCTGGTACCCAGTCCTAAAATATTGCTGCTT
CCTCTTCCTTTGAAGCATCATCAGTAGTCACACCCTCACAGCTGGCCTG
CCCTCTTGCCAGGATATTTATTTGTGCTATTCACTCCCTTCCCTTTGGA
TGTAACTTCTCCGTTCAGTTCCCTCCTTTTCTTGCATGTAAGTTGTCCC
CCATCCCAAAGTATTCCATCTACTTTTCTATCGCCGTCCCCTTTTGCAG
CCCTCTCTGGGGATGGACTGGGTAAATGTTGACAGAGGCCCTGCCCCGT
TCACAGATCCTGGCCCTGAGCCAGCCCTGTGCTCCTCCCTCCCCCAACA
CTCCCTACCAACCCCCTAATCCCCTACTCCCTCCACCCCCCCTCCACTG
TAGGCCACTGGATGGTCATTTGCATCTCCGTAAATGTGCTCTGCTCCTC
AGCTGAGAGAGAAAAAAATAAACTGTATTTGGCTGCAA

[0337] By “cluster of differentiation 3 gamma (CD3g or CD3 gamma) is meant a protein having at least about 85% amino acid sequence identity to NCBI Accession No. NP_000064.1 or fragment thereof and having immunomodulatory activity. An exemplary amino acid sequence is provided below.

>NP_000064.1 T-cell surface glycoprotein CD3 gamma chain precursor [Homo sapiens]

MEQGKGLAVLILAIILLQGTLAQSIKGNHLVKVYDYQEDGSVLLTCDAE
AKNITWFKDGKMIGFLTEDKKKWNLGSNAKDPRGMYQCKGSQNKSKPLQ
VYYRMCQNCIELNAATISGFLFAEIVSIFVLAVGVYFIAGQDGVRQSRA
SDKQTLLPNDQLYQPLKDREDDQYSHLQGNQLRRN

[0338] By “cluster of differentiation 3 gamma (CD3g or CD3 gamma)” is meant a nucleic acid encoding a CD3g polypeptide. An exemplary CD3g nucleic acid sequence is provided below.

>NM 000073.3 Homo sapiens CD3g molecule (CD3G), mRNA

AGTCTAGCTGCTGCACAGGCTGGCTGGCTGGCTGGCTGCTAAGGGCTGC
TCCACGCTTTTGCCGGAGGACAGAGACTGACATGGAACAGGGGAAGGGC
CTGGCTGTCCTCATCCTGGCTATCATTCTTCTTCAAGGTACTTTGGCCC
AGTCAATCAAAGGAAACCACTTGGTTAAGGTGTATGACTATCAAGAAGA
TGGTTCGGTACTTCTGACTTGTGATGCAGAAGCCAAAAATATCACATGG
TTTAAAGATGGGAAGATGATCGGCTTCCTAACTGAAGATAAAAAAAAAT
GGAATCTGGGAAGTAATGCCAAGGACCCTCGAGGGATGTATCAGTGTAA
AGGATCACAGAACAAGTCAAAACCACTCCAAGTGTATTACAGAATGTGT
CAGAACTGCATTGAACTAAATGCAGCCACCATATCTGGCTTTCTCTTTG
CTGAAATCGTCAGCATTTTCGTCCTTGCTGTTGGGGTCTACTTCATTGC
TGGACAGGATGGAGTTCGCCAGTCGAGAGCTTCAGACAAGCAGACTCTG
TTGCCCAATGACCAGCTCTACCAGCCCCTCAAGGATCGAGAAGATGACC
AGTACAGCCACCTTCAAGGAAACCAGTTGAGGAGGAATTGAACTCAGGA
CTCAGAGTAGTCCAGGTGTTCTCCTCCTATTCAGTTCCCAGAATCAAAG
CAATGCATTTTGGAAAGCTCCTAGCAGAGAGACTTTCAGCCCTAAATCT
AGACTCAAGGTTCCCAGAGATGACAAATGGAGAAGAAAGGCCATCAGAG
CAAATTTGGGGGTTTCTCAAATAAAATAAAAATAAAAACAAATACTGTG
TTTCAGAAGCGCCACCTATTGGGGAAAATTGTAAAAGAAAAATGAAAAG
ATCAAATAACCCCCTGGATTTGAATATAATTTTTTGTGTTGTAATTTTT
ATTTCGTTTTTGTATAGGTTATAATTCACATGGCTCAAATATTCAGTGA
AAGCTCTCCCTCCACCGCCATCCCCTGCTACCCAGTGACCCTGTTGCCC
TCTTCAGAGACAAATTAGTTTCTCTTTTTTTTTTTTTTTTTTTTTTTTT
TGAGACAGTCTGGCTCTGTCACCCAGGCTGAAATGCAGTGGCACCATCT
CGGCTCACTGCAACCTCTGCCTCCTGGGTTCAAGCGATTCTCCTGCCTC
AGCCTCCCGGGCAGCTGGGATTACAGGCACACACTACCACACCTGGCTA
ATTTTTGTATTTTTAGTAGAGACAGGGTTTTGCTCTGTTGGCCAAGCTG
GTCTCGAACTCCTGACCTCAAGTGATCCGCCCGCCTCAGCCTCCCAAAG
TGCTGGGATTACAGGTGTGAGCCACCATGCCTGGTCTTAAAACCAGTTT
CTTATATATCTCTCTGGAGGTATTCTAGGCATATATGAGCACATTCTCA
AGTACATATTATCCTCCCTTCCCCTATCTTTTAGACAAATGATATCAAA
CTATACATCTTGTGAGATTATTGCATACCATTATATGAAGATACCATTA
TATCCTTTTTAATGCAACCATATTGTACAAATAGACTATGATTTATTTA
ACCTGTTATCTATCAGTGGATATTTAAGTTGGTAGTTGGTTCCAATCTT
TTGCTCTTACAACAATTCTGCAATGACTAACATTGTATAAATATCATTT
TTAAAAATAATTGCATTGAAGCATAATGTACATGCCATAAAATCCACCC
ATCTTAAGTGATTTCACCTGTTCTCAGAAATTTTTAGTAAATTTAACTA
ATTGTACAGCCATTACCATAATCCAGCTTTAGGACATTTTCTTTTTTTT
CTTTTCTTTTCTTTTTTTTCTTTTTTTTTTTTTTTTGAAGTGGAATCTT
GCTCTGTGGCCCAGGCTGGAGTGCAGTGGCGCGATCTCAGCTCACTGCA
ACCTCCACCTCCTGGGTTCAAGCGATTCTCTTGCCTTGGCCTCCCGAGT
AGCTGAGACTACAGGCACATGCCACCACGCCCAGCTCATTTTTTGTGTA
TTTAGTATTTGTGTATCTAGTATTTGTGTACTTAGTAGAGACAGGGTTT
CACCATGTTGGCCAGGCTGGTCTCCAATTCCTGACCTCAGGCGATCCAC
CCGCCTTGACCTCCCAAAGTGCTGGGATTACAGGTGTGAGCCACCGCGC
CAGGCCCGTAACTGTATTTTAATATAGCCATTCTATGGATTTAATATGG
TATTTTATTATGGCCTTAATTTGCATTTCCCTAGATACTAACCATGCTG
AGTGTCCTGTCTTGTGTTTATTAACCATTCATATATTTTTAGTGAAATG
TGTATCAAATCTTTTGCCCATTTTTAAGTTGACTTATTTGTTTGTCTTC
TTACTATTGGGTTGCATATGTTTTTGATATAAGTCCTTTATCAGATATA
TGATTTGGAAATATTTTCTACCAATCTGTGGTTTGTTTTTCTTAATGGT
GTCTTTTGAAGTGCAAAAGGTTTGAATTTTGAAGTACATTTTATTGATT
TTTTCTTCTATATATTGTGCTTTTGGTATCATGTCTAATAAATCTTTAC
CAAACCCACAGTTACAAAGATTTTCTCCTGTCTTCTTTTTATACTTTTT
ACAGCTTTATGGTTTTAGCTCTAACAATAAATGTGATTTTGAACATACA
TAAGACTATTTGTAACAAACACAAATAAATTGAATTGTTGGGCA

[0339] By “cluster of differentiation 3 delta (CD3d or CD3 delta) is meant a protein having at least about 85% amino acid sequence identity to NCBI Accession No. NP_000723.1 or fragment thereof and having immunomodulatory activity. An exemplary amino acid sequence is provided below.

>NP_000723.1 T-cell surface glycoprotein CD3 delta chain isoform A precursor [Homo sapiens]

MEHSTFLSGLVLATLLSQVSPFKIPIEELEDRVFVNCNTSITWVEGTVG
TLLSDITRLDLGKRILDPRGIYRCNGTDIYKDKESTVQVHYRMCQSCVE
LDPATVAGIIVTDVIATLLLALGVFCFAGHETGRLSGAADTQALLRNDQ
VYQPLRDRDDAQYSHLGGNWARNK

[0340] By “cluster of differentiation 3 delta (CD3d or CD3 delta)” is meant a nucleic acid encoding a CD3d polypeptide. An exemplary CD3d nucleic acid sequence is provided below.

>NM_000732.4 Homo sapiens CD3d molecule (CD3D), transcript variant 1, mRNA

AGAGAAGCAGACATCTTCTAGTTCCTCCCCCACTCTCCTCTTTCCGGTA
CCTGTGAGTCAGCTAGGGGAGGGCAGCTCTCACCCAGGCTGATAGTTCG
GTGACCTGGCTTTATCTACTGGATGAGTTCCGCTGGGAGATGGAACATA
GCACGTTTCTCTCTGGCCTGGTACTGGCTACCCTTCTCTCGCAAGTGAG
CCCCTTCAAGATACCTATAGAGGAACTTGAGGACAGAGTGTTTGTGAAT
TGCAATACCAGCATCACATGGGTAGAGGGAACGGTGGGAACACTGCTCT
CAGACATTACAAGACTGGACCTGGGAAAACGCATCCTGGACCCACGAGG
AATATATAGGTGTAATGGGACAGATATATACAAGGACAAAGAATCTACC
GTGCAAGTTCATTATCGAATGTGCCAGAGCTGTGTGGAGCTGGATCCAG
CCACCGTGGCTGGCATCATTGTCACTGATGTCATTGCCACTCTGCTCCT
TGCTTTGGGAGTCTTCTGCTTTGCTGGACATGAGACTGGAAGGCTGTCT
GGGGCTGCCGACACACAAGCTCTGTTGAGGAATGACCAGGTCTATCAGC
CCCTCCGAGATCGAGATGATGCTCAGTACAGCCACCTTGGAGGAAACTG
GGCTCGGAACAAGTGAACCTGAGACTGGTGGCTTCTAGAAGCAGCCATT
ACCAACTGTACCTTCCCTTCTTGCTCAGCCAATAAATATATCCTCTTTC
ACTCAGAAAAAAAAAAAAAAAAAAAAAAAAAAAAAA

[0341] By “cluster of differentiation 4 (CD4)” is meant a protein having at least about 85% amino acid sequence identity to NCBI Accession No. NP_000607.1 or fragment thereof and having immunomodulatory activity. An exemplary amino acid sequence is provided below.

>NP_000607.1 T-cell surface glycoprotein CD4 isoform 1 precursor [Homo sapiens]

MNRGVPFRHLLLVLQLALLPAATQGKKVVLGKKGDTVELTCTASQKKSI
QFHWKNSNQIKILGNQGSFLTKGPSKLNDRADSRRSLWDQGNFPLIIKN
LKIEDSDTYICEVEDQKEEVQLLVFGLTANSDTHLLQGQSLTLTLESPP
GSSPSVQCRSPRGKNIQGGKTLSVSQLELQDSGTWTCTVLQNQKKVEFK
IDIVVLAFQKASSIVYKKEGEQVEFSFPLAFTVEKLTGSGELWWQAERA
SSSKSWITFDLKNKEVSVKRVTQDPKLQMGKKLPLHLTLPQALPQYAGS
GNLTLALEAKTGKLHQEVNLVVMRATQLQKNLTCEVWGPTSPKLMLSLK
LENKEAKVSKREKAVWVLNPEAGMWQCLLSDSGQVLLESNIKVLPTWST
PVQPMALIVLGGVAGLLLFIGLGIFFCVRCRHRRRQAERMSQIKRLLSE
KKTCQCPHRFQKTCSPI

[0342] By “cluster of differentiation 4 (CD4)” is meant a nucleic acid encoding a CD4 polypeptide. An exemplary CD4 nucleic acid sequence is provided below.

>NM_000616.5 Homo sapiens CD4 molecule (CD4), transcript variant 1, mRNA

CTCTCTTCATTTAAGCACGACTCTGCAGAAGGAACAAAGCACCCTCCCC
ACTGGGCTCCTGGTTGCAGAGCTCCAAGTCCTCACACAGATACGCCTGT
TTGAGAAGCAGCGGGCAAGAAAGACGCAAGCCCAGAGGCCCTGCCATTT
CTGTGGGCTCAGGTCCCTACTGGCTCAGGCCCCTGCCTCCCTCGGCAAG
GCCACAATGAACCGGGGAGTCCCTTTTAGGCACTTGCTTCTGGTGCTGC
AACTGGCGCTCCTCCCAGCAGCCACTCAGGGAAAGAAAGTGGTGCTGGG
CAAAAAAGGGGATACAGTGGAACTGACCTGTACAGCTTCCCAGAAGAAG
AGCATACAATTCCACTGGAAAAACTCCAACCAGATAAAGATTCTGGGAA
ATCAGGGCTCCTTCTTAACTAAAGGTCCATCCAAGCTGAATGATCGCGC
TGACTCAAGAAGAAGCCTTTGGGACCAAGGAAACTTTCCCCTGATCATC
AAGAATCTTAAGATAGAAGACTCAGATACTTACATCTGTGAAGTGGAGG
ACCAGAAGGAGGAGGTGCAATTGCTAGTGTTCGGATTGACTGCCAACTC
TGACACCCACCTGCTTCAGGGGCAGAGCCTGACCCTGACCTTGGAGAGC
CCCCCTGGTAGTAGCCCCTCAGTGCAATGTAGGAGTCCAAGGGGTAAAA
ACATACAGGGGGGGAAGACCCTCTCCGTGTCTCAGCTGGAGCTCCAGGA
TAGTGGCACCTGGACATGCACTGTCTTGCAGAACCAGAAGAAGGTGGAG
TTCAAAATAGACATCGTGGTGCTAGCTTTCCAGAAGGCCTCCAGCATAG
TCTATAAGAAAGAGGGGGAACAGGTGGAGTTCTCCTTCCCACTCGCCTT
TACAGTTGAAAAGCTGACGGGCAGTGGCGAGCTGTGGTGGCAGGCGGAG
AGGGCTTCCTCCTCCAAGTCTTGGATCACCTTTGACCTGAAGAACAAGG
AAGTGTCTGTAAAACGGGTTACCCAGGACCCTAAGCTCCAGATGGGCAA
GAAGCTCCCGCTCCACCTCACCCTGCCCCAGGCCTTGCCTCAGTATGCT
GGCTCTGGAAACCTCACCCTGGCCCTTGAAGCGAAAACAGGAAAGTTGC
ATCAGGAAGTGAACCTGGTGGTGATGAGAGCCACTCAGCTCCAGAAAAA
TTTGACCTGTGAGGTGTGGGGACCCACCTCCCCTAAGCTGATGCTGAGT
TTGAAACTGGAGAACAAGGAGGCAAAGGTCTCGAAGCGGGAGAAGGCGG
TGTGGGTGCTGAACCCTGAGGCGGGGATGTGGCAGTGTCTGCTGAGTGA
CTCGGGACAGGTCCTGCTGGAATCCAACATCAAGGTTCTGCCCACATGG
TCCACCCCGGTGCAGCCAATGGCCCTGATTGTGCTGGGGGGCGTCGCCG
GCCTCCTGCTTTTCATTGGGCTAGGCATCTTCTTCTGTGTCAGGTGCCG
GCACCGAAGGCGCCAAGCAGAGCGGATGTCTCAGATCAAGAGACTCCTC
AGTGAGAAGAAGACCTGCCAGTGTCCTCACCGGTTTCAGAAGACATGTA
GCCCCATTTGAGGCACGAGGCCAGGCAGATCCCACTTGCAGCCTCCCCA
GGTGTCTGCCCCGCGTTTCCTGCCTGCGGACCAGATGAATGTAGCAGAT
CCCCAGCCTCTGGCCTCCTGTTCGCCTCCTCTACAATTTGCCATTGTTT
CTCCTGGGTTAGGCCCCGGCTTCACTGGTTGAGTGTTGCTCTCTAGTTT
CCAGAGGCTTAATCACACCGTCCTCCACGCCATTTCCTTTTCCTTCAAG
CCTAGCCCTTCTCTCATTATTTCTCTCTGACCCTCTCCCCACTGCTCAT
TTGGATCCCAGGGGAGTGTTCAGGGCCAGCCCTGGCTGGCATGGAGGGT
GAGGCTGGGTGTCTGGAAGCATGGAGCATGGGACTGTTCTTTTACAAGA
CAGGACCCTGGGACCACAGAGGGCAGGAACTTGCACAAAATCACACAGC
CAAGCCAGTCAAGGATGGATGCAGATCCAGAGGTTTCTGGCAGCCAGTA
CCTCCTGCCCCATGCTGCCCGCTTCTCACCCTATGTGGGTGGGACCACA
GACTCACATCCTGACCTTGCACAAACAGCCCCTCTGGACACAGCCCCAT
GTACACGGCCTCAAGGGATGTCTCACATCCTCTGTCTATTTGAGACTTA
GAAAAATCCTACAAGGCTGGCAGTGACAGAACTAAGATGATCATCTCCA
GTTTATAGACCAGAACCAGAGCTCAGAGAGGCTAGATGATTGATTACCA
AGTGCCGGACTAGCAAGTGCTGGAGTCGGGACTAACCCAGGTCCCTTGT
CCCAAGTTCCACTGCTGCCTCTTGAATGCAGGGACAAATGCCACACGGC
TCTCACCAGTGGCTAGTGGTGGGTACTCAATGTGTACTTTTGGGTTCAC
AGAAGCACAGCACCCATGGGAAGGGTCCATCTCAGAGAATTTACGAGCA
GGGATGAAGGCCTCCCTGTCTAAAATCCCTCCTTCATCCCCCGCTGGTG
GCAGAATCTGTTACCAGAGGACAAAGCCTTTGGCTCTTCTAATCAGAGC
GCAAGCTGGGAGCACAGGCACTGCAGGAGAGAATGCCCAGTGACCAGTC
ACTGACCCTGTGCAGAACCTCCTGGAAGCGAGCTTTGCTGGGAGAGGGG
GTAGCTAGCCTGAGAGGGAACCCTCTAAGGGACCTCAAAGGTGATTGTG
CCAGGCTCTGCGCCTGCCCCACACCCTCCCTTACCCTCCTCCAGACCAT
TCAGGACACAGGGAAATCAGGGTTACAAATCTTCTTGATCCACTTCTCT
CAGGATCCCCTCTCTTCCTACCCTTCCTCACCACTTCCCTCAGTCCCAA
CTCCTTTTCCCTATTTCCTTCTCCTCCTGTCTTTAAAGCCTGCCTCTTC
CAGGAAGACCCCCCTATTGCTGCTGGGGCTCCCCATTTGCTTACTTTGC
ATTTGTGCCCACTCTCCACCCCTGCTCCCCTGAGCTGAAATAAAAATAC
AATAAACTTAC

[0343] By “cluster of differentiation 5 (CD5)” is meant a protein having at least about 85% amino acid sequence identity to NCBI Accession No. NP_001333385.1 or fragment thereof and having immunomodulatory activity. An exemplary amino acid sequence is provided below.

>NP_001333385.1 T-cell surface glycoprotein CD5 isoform 2 [Homo sapiens]

MVCSQSWGRSSKQWEDPSQASKVCQRLNCGVPLSLGPFLVTYTPQSSII
CYGQLGSFSNCSHSRNDMCHSLGLTCLEPQKTTPPTTRPPPTTTPEPTA
PPRLQLVAQSGGQHCAGVVEFYSGSLGGTISYEAQDKTQDLENFLCNNL
QCGSFLKHLPETEAGRAQDPGEPREHQPLPIQWKIQNSSCTSLEHCFRK
IKPQKSGRVLALLCSGFQPKVQSRLVGGSSICEGTVEVRQGAQWAALCD
SSSARSSLRWEEVCREQQCGSVNSYRVLDAGDPTSRGLFCPHQKLSQCH
ELWERNSYCKKVFVTCQDPNPAGLAAGTVASIILALVLLVVLLVVCGPL
AYKKLVKKFRQKKQRQWIGPTGMNQNMSFHRNHTATVRSHAENPTASHV
DNEYSQPPRNSHLSAYPALEGALHRSSMQPDNSSDSDYDLHGAQRL

[0344] By “cluster of differentiation 5 (CD5)” is meant a nucleic acid encoding a CD5 polypeptide. An exemplary CD5 nucleic acid sequence is provided below. >NM_001346456.1 Homo sapiens CD5 molecule (CD5), transcript variant 2, mRNA

GAGTCTTGCTGATGCTCCCGGCTGAATAAACCCCTTCCTTCTTTAACTT
GGTGTCTGAGGGGTTTTGTCTGTGGCTTGTCCTGCTACATTTCTTGGTT
CCCTGACCAGGAAGCAAAGTGATTAACGGACAGTTGAGGCAGCCCCTTA
GGCAGCTTAGGCCTGCCTTGTGGAGCATCCCCGCGGGGAACTCTGGCCA
GCTTGAGCGACACGGATCCTCAGAGCGCTCCCAGGTAGGCAATTGCCCC
AGTGGAATGCCTCGTCAGAGCAGTGCATGGCAGGCCCCTGTGGAGGATC
AACGCAGTGGCTGAACACAGGGAAGGAACTGGCACTTGGAGTCCGGACA
ACTGAAACTTGTCGCTTCCTGCCTCGGACGGCTCAGCTGGTATGACCCA
GATTTCCAGGCAAGGCTCACCCGTTCCAACTCGAAGTGCCAGGGCCAGC
TGGAGGTCTACCTCAAGGACGGATGGCACATGGTTTGCAGCCAGAGCTG
GGGCCGGAGCTCCAAGCAGTGGGAGGACCCCAGTCAAGCGTCAAAAGTC
TGCCAGCGGCTGAACTGTGGGGTGCCCTTAAGCCTTGGCCCCTTCCTTG
TCACCTACACACCTCAGAGCTCAATCATCTGCTACGGACAACTGGGCTC
CTTCTCCAACTGCAGCCACAGCAGAAATGACATGTGTCACTCTCTGGGC
CTGACCTGCTTAGAACCCCAGAAGACAACACCTCCAACGACAAGGCCCC
CGCCCACCACAACTCCAGAGCCCACAGCTCCTCCCAGGCTGCAGCTGGT
GGCACAGTCTGGCGGCCAGCACTGTGCCGGCGTGGTGGAGTTCTACAGC
GGCAGCCTGGGGGGTACCATCAGCTATGAGGCCCAGGACAAGACCCAGG
ACCTGGAGAACTTCCTCTGCAACAACCTCCAGTGTGGCTCCTTCTTGAA
GCATCTGCCAGAGACTGAGGCAGGCAGAGCCCAAGACCCAGGGGAGCCA
CGGGAACACCAGCCCTTGCCAATCCAATGGAAGATCCAGAACTCAAGCT
GTACCTCCCTGGAGCATTGCTTCAGGAAAATCAAGCCCCAGAAAAGTGG
CCGAGTTCTTGCCCTCCTTTGCTCAGGTTTCCAGCCCAAGGTGCAGAGC
CGTCTGGTGGGGGGCAGCAGCATCTGTGAAGGCACCGTGGAGGTGCGCC
AGGGGGCTCAGTGGGCAGCCCTGTGTGACAGCTCTTCAGCCAGGAGCTC
GCTGCGGTGGGAGGAGGTGTGCCGGGAGCAGCAGTGTGGCAGCGTCAAC
TCCTATCGAGTGCTGGACGCTGGTGACCCAACATCCCGGGGGCTCTTCT
GTCCCCATCAGAAGCTGTCCCAGTGCCACGAACTTTGGGAGAGAAATTC
CTACTGCAAGAAGGTGTTTGTCACATGCCAGGATCCAAACCCCGCAGGC
CTGGCCGCAGGCACGGTGGCAAGCATCATCCTGGCCCTGGTGCTCCTGG
TGGTGCTGCTGGTCGTGTGCGGCCCCCTTGCCTACAAGAAGCTAGTGAA
GAAATTCCGCCAGAAGAAGCAGCGCCAGTGGATTGGCCCAACGGGAATG
AACCAAAACATGTCTTTCCATCGCAACCACACGGCAACCGTCCGATCCC
ATGCTGAGAACCCCACAGCCTCCCACGTGGATAACGAATACAGCCAACC
TCCCAGGAACTCCCACCTGTCAGCTTATCCAGCTCTGGAAGGGGCTCTG
CATCGCTCCTCCATGCAGCCTGACAACTCCTCCGACAGTGACTATGATC
TGCATGGGGCTCAGAGGCTGTAAAGAACTGGGATCCATGAGCAAAAAGC
CGAGAGCCAGACCTGTTTGTCCTGAGAAAACTGTCCGCTCTTCACTTGA
AATCATGTCCCTATTTCTACCCCGGCCAGAACATGGACAGAGGCCAGAA
GCCTTCCGGACAGGCGCTGCTGCCCCGAGTGGCAGGCCAGCTCACACTC
TGCTGCACAACAGCTCGGCCGCCCCTCCACTTGTGGAAGCTGTGGTGGG
CAGAGCCCCAAAACAAGCAGCCTTCCAACTAGAGACTCGGGGGTGTCTG
AAGGGGGCCCCCTTTCCCTGCCCGCTGGGGAGCGGCGTCTCAGTGAAAT
CGGCTTTCTCCTCAGACTCTGTCCCTGGTAAGGAGTGACAAGGAAGCTC
ACAGCTGGGCGAGTGCATTTTGAATAGTTTTTTGTAAGTAGTGCTTTTC
CTCCTTCCTGACAAATCGAGCGCTTTGGCCTCTTCTGTGCAGCATCCAC
CCCTGCGGATCCCTCTGGGGAGGACAGGAAGGGGACTCCCGGAGACCTC
TGCAGCCGTGGTGGTCAGAGGCTGCTCACCTGAGCACAAAGACAGCTCT
GCACATTCACCGCAGCTGCCAGCCAGGGGTCTGGGTGGGCACCACCCTG
ACCCACAGCGTCACCCCACTCCCTCTGTCTTATGACTCCCCTCCCCAAC
CCCCTCATCTAAAGACACCTTCCTTTCCACTGGCTGTCAAGCCCACAGG
GCACCAGTGCCACCCAGGGCCCGGCACAAAGGGGCGCCTAGTAAACCTT
AACCAACTTGGTTTTTTGCTTCACCCAGCAATTAAAAGTCCCAAGCTGA
GGTAGTTTCAGTCCATCACAGTTCATCTTCTAACCCAAGAGTCAGAGAT
GGGGCTGGTCATGTTCCTTTGGTTTGAATAACTCCCTTGACGAAAACAG
ACTCCTCTAGTACTTGGAGATCTTGGACGTACACCTAATCCCATGGGGC
CTCGGCTTCCTTAACTGCAAGTGAGAAGAGGAGGTCTACCCAGGAGCCT
CGGGTCTGATCAAGGGAGAGGCCAGGCGCAGCTCACTGCGGCGGCTCCC
TAAGAAGGTGAAGCAACATGGGAACACATCCTAAGACAGGTCCTTTCTC
CACGCCATTTGATGCTGTATCTCCTGGGAGCACAGGCATCAATGGTCCA
AGCCGCATAATAAGTCTGGAAGAGCAAAAGGGAGTTACTAGGATATGGG
GTGGGCTGCTCCCAGAATCTGCTCAGCTTTCTGCCCCCACCAACACCCT
CCAACCAGGCCTTGCCTTCTGAGAGCCCCCGTGGCCAAGCCCAGGTCAC
AGATCTTCCCCCGACCATGCTGGGAATCCAGAAACAGGGACCCCATTTG
TCTTCCCATATCTGGTGGAGGTGAGGGGGCTCCTCAAAAGGGAACTGAG
AGGCTGCTCTTAGGGAGGGCAAAGGTTCGGGGGCAGCCAGTGTCTCCCA
TCAGTGCCTTTTTTAATAAAAGCTCTTTCATCTATAGTTTGGCCACCAT
ACAGTGGCCTCAAAGCAACCATGGCCTACTTAAAAACCAAACCAAAAAT
AAAGAGTTTAGTTGAGGAGAAAAAAAAAAAAAAAAAAAAAAAAA

[0345] By “cluster of differentiation 7 (CD7)” is meant a protein having at least about 85% amino acid sequence identity to NCBI Accession No. NP_006128.1 or fragment thereof and having immunomodulatory activity. An exemplary amino acid sequence is provided below.

>NP_006128.1 T-cell antigen CD7 precursor [Homo sapiens]

MAGPPRLLLLPLLLALARGLPGALAAQEVQQSPHCTTVPVGASVNITCS
TSGGLRGIYLRQLGPQPQDIIYYEDGVVPTTDRRFRGRIDFSGSQDNLT
ITMHRLQLSDTGTYTCQAITEVNVYGSGTLVLVTEEQSQGWHRCSDAPP
RASALPAPPTGSALPDPQTASALPDPPAASALPAALAVISFLLGLGLGV
ACVLARTQIKKLCSWRDKNSAACVVYEDMSHSRCNTLSSPNQYQ

[0346] By “cluster of differentiation 7 (CD7)” is meant a nucleic acid encoding a CD7 polypeptide. An exemplary CD7 nucleic acid sequence is provided below.

>NM_006137.7 Homo sapiens CD7 molecule (CD7), mRNA

CTCTCTGAGCTCTGAGCGCCTGCGGTCTCCTGTGTGCTGCTCTCTGTGG
GGTCCTGTAGACCCAGAGAGGCTCAGCTGCACTCGCCCGGCTGGGAGAG
CTGGGTGTGGGGAACATGGCCGGGCCTCCGAGGCTCCTGCTGCTGCCCC
TGCTTCTGGCGCTGGCTCGCGGCCTGCCTGGGGCCCTGGCTGCCCAAGA
GGTGCAGCAGTCTCCCCACTGCACGACTGTCCCCGTGGGAGCCTCCGTC
AACATCACCTGCTCCACCAGCGGGGGCCTGCGTGGGATCTACCTGAGGC
AGCTCGGGCCACAGCCCCAAGACATCATTTACTACGAGGACGGGGTGGT
GCCCACTACGGACAGACGGTTCCGGGGCCGCATCGACTTCTCAGGGTCC
CAGGACAACCTGACTATCACCATGCACCGCCTGCAGCTGTCGGACACTG
GCACCTACACCTGCCAGGCCATCACGGAGGTCAATGTCTACGGCTCCGG
CACCCTGGTCCTGGTGACAGAGGAACAGTCCCAAGGATGGCACAGATGC
TCGGACGCCCCACCAAGGGCCTCTGCCCTCCCTGCCCCACCGACAGGCT
CCGCCCTCCCTGACCCGCAGACAGCCTCTGCCCTCCCTGACCCGCCAGC
AGCCTCTGCCCTCCCTGCGGCCCTGGCGGTGATCTCCTTCCTCCTCGGG
CTGGGCCTGGGGGTGGCGTGTGTGCTGGCGAGGACACAGATAAAGAAAC
TGTGCTCGTGGCGGGATAAGAATTCGGCGGCATGTGTGGTGTACGAGGA
CATGTCGCACAGCCGCTGCAACACGCTGTCCTCCCCCAACCAGTACCAG
TGACCCAGTGGGCCCCTGCACGTCCCGCCTGTGGTCCCCCCAGCACCTT
CCCTGCCCCACCATGCCCCCCACCCTGCCACACCCCTCACCCTGCTGTC
CTCCCACGGCTGCAGCAGAGTTTGAAGGGCCCAGCCGTGCCCAGCTCCA
AGCAGACACACAGGCAGTGGCCAGGCCCCACGGTGCTTCTCAGTGGACA
ATGATGCCTCCTCCGGGAAGCCTTCCCTGCCCAGCCCACGCCGCCACCG
GGAGGAAGCCTGACTGTCCTTTGGCTGCATCTCCCGACCATGGCCAAGG
AGGGCTTTTCTGTGGGATGGGCCTGGGCACGCGGCCCTCTCCTGTCAGT
GCCGGCCCACCCACCAGCAGGCCCCCAACCCCCAGGCAGCCCGGCAGAG
GACGGGAGGAGACCAGTCCCCCACCCAGCCGTACCAGAAATAAAGGCTT
CTGTGCTTCC

[0347] By “cluster of differentiation 30 (CD30)” is meant a protein having at least about 85% amino acid sequence identity to NCBI Accession No. NP_001234.3 or fragment thereof and having immunomodulatory activity. An exemplary amino acid sequence is provided below.

>NP_001234.3 tumor necrosis factor receptor superfamily member 8 isoform 1 precursor [Homo sapiens]

MRVLLAALGLLFLGALRAFPQDRPFEDTCHGNPSHYYDKAVRRCCYRCPMG
LFPTQQCPQRPTDCRKQCEPDYYLDEADRCTACVTCSRDDLVEKTPCAWNS
SRVCECRPGMFCSTSAVNSCARCFFHSVCPAGMIVKFPGTAQKNTVCEPAS
PGVSPACASPENCKEPSSGTIPQAKPTPVSPATSSASTMPVRGGTRLAQEA
ASKLTRAPDSPSSVGRPSSDPGLSPTQPCPEGSGDCRKQCEPDYYLDEAGR
CTACVSCSRDDLVEKTPCAWNSSRTCECRPGMICATSATNSCARCVPYPIC
AAETVTKPQDMAEKDTTFEAPPLGTQPDCNPTPENGEAPASTSPTQSLLVD
SQASKTLPIPTSAPVALSSTGKPVLDAGPVLFWVILVLVVVVGSSAFLLCH
RRACRKRIRQKLHLCYPVQTSQPKLELVDSRPRRSSTQLRSGASVTEPVAE
ERGLMSQPLMETCHSVGAAYLESLPLQDASPAGGPSSPRDLPEPRVSTEHT
NNKIEKIYIMKADTVIVGTVKAELPEGRGLAGPAEPELEEELEADHTPHYP
EQETEPPLGSCSDVMLSVEEEGKEDPLPTAASGK

[0348] By “cluster of differentiation 30 (CD30)” is meant a nucleic acid encoding a CD30 polypeptide. An exemplary CD30 nucleic acid sequence is provided below. >NM_001243.5 Homo sapiens TNF receptor superfamily member 8 (TNFRSF8), transcript variant 1, mRNA

CTGAGTCATCTCTGCACGTGTTTGCCCCCTTTTTTCTTCGCTGCTTGTAGC
TAAGTGTTCCTGGAACCAATTTGATACGGGAGAACTAAGGCTGAAACCTCG
GAGGAACAACCACTTTTGAAGTGACTTCGCGGCGTGCGTTGGGTGCGGACT
AGGTGGCCGCGGCGGGAGTGTGCTGGAGCCTGAAGTCCACGCGCGCGGCTG
AGAACCGCCGGGACCGCACGTGGGCGCCGCGCGCTTCCCCCGCTTCCCAGG
TGGGCGCCGGCCGCCAGGCCACCTCACGTCCGGCCCCGGGGATGCGCGTCC
TCCTCGCCGCGCTGGGACTGCTGTTCCTGGGGGCGCTACGAGCCTTCCCAC
AGGATCGACCCTTCGAGGACACCTGTCATGGAAACCCCAGCCACTACTATG
ACAAGGCTGTCAGGAGGTGCTGTTACCGCTGCCCCATGGGGCTGTTCCCGA
CACAGCAGTGCCCACAGAGGCCTACTGACTGCAGGAAGCAGTGTGAGCCTG
ACTACTACCTGGATGAGGCCGACCGCTGTACAGCCTGCGTGACTTGTTCTC
GAGACGACCTCGTGGAGAAGACGCCGTGTGCATGGAACTCCTCCCGTGTCT
GCGAATGTCGACCCGGCATGTTCTGTTCCACGTCTGCCGTCAACTCCTGTG
CCCGCTGCTTCTTCCATTCTGTCTGTCCGGCAGGGATGATTGTCAAGTTCC
CAGGCACGGCGCAGAAGAACACGGTCTGTGAGCCGGCTTCCCCAGGGGTCA
GCCCTGCCTGTGCCAGCCCAGAGAACTGCAAGGAACCCTCCAGTGGCACCA
TCCCCCAGGCCAAGCCCACCCCGGTGTCCCCAGCAACCTCCAGTGCCAGCA
CCATGCCTGTAAGAGGGGGCACCCGCCTCGCCCAGGAAGCTGCTTCTAAAC
TGACGAGGGCTCCCGACTCTCCCTCCTCTGTGGGAAGGCCTAGTTCAGATC
CAGGTCTGTCCCCAACACAGCCATGCCCAGAGGGGTCTGGTGATTGCAGAA
AGCAGTGTGAGCCCGACTACTACCTGGACGAGGCCGGCCGCTGCACGGCCT
GCGTGAGCTGTTCTCGAGATGACCTTGTGGAGAAGACGCCATGTGCATGGA
ACTCCTCCCGCACCTGCGAATGTCGACCTGGCATGATCTGTGCCACATCAG
CCACCAACTCCTGTGCCCGCTGTGTCCCCTACCCAATCTGTGCAGCAGAGA
CGGTCACCAAGCCCCAGGATATGGCTGAGAAGGACACCACCTTTGAGGCGC
CACCCCTGGGGACCCAGCCGGACTGCAACCCCACCCCAGAGAATGGCGAGG
CGCCTGCCAGCACCAGCCCCACTCAGAGCTTGCTGGTGGACTCCCAGGCCA
GTAAGACGCTGCCCATCCCAACCAGCGCTCCCGTCGCTCTCTCCTCCACGG
GGAAGCCCGTTCTGGATGCAGGGCCAGTGCTCTTCTGGGTGATCCTGGTGT
TGGTTGTGGTGGTCGGCTCCAGCGCCTTCCTCCTGTGCCACCGGAGGGCCT
GCAGGAAGCGAATTCGGCAGAAGCTCCACCTGTGCTACCCGGTCCAGACCT
CCCAGCCCAAGCTAGAGCTTGTGGATTCCAGACCCAGGAGGAGCTCAACGC
AGCTGAGGAGTGGTGCGTCGGTGACAGAACCCGTCGCGGAAGAGCGAGGGT
TAATGAGCCAGCCACTGATGGAGACCTGCCACAGCGTGGGGGCAGCCTACC
TGGAGAGCCTGCCGCTGCAGGATGCCAGCCCGGCCGGGGGCCCCTCGTCCC
CCAGGGACCTTCCTGAGCCCCGGGTGTCCACGGAGCACACCAATAACAAGA
TTGAGAAAATCTACATCATGAAGGCTGACACCGTGATCGTGGGGACCGTGA
AGGCTGAGCTGCCGGAGGGCCGGGGCCTGGCGGGGCCAGCAGAGCCCGAGT
TGGAGGAGGAGCTGGAGGCGGACCATACCCCCCACTACCCCGAGCAGGAGA
CAGAACCGCCTCTGGGCAGCTGCAGCGATGTCATGCTCTCAGTGGAAGAGG
AAGGGAAAGAAGACCCCTTGCCCACAGCTGCCTCTGGAAAGTGAGGCCTGG
GCTGGGCTGGGGCTAGGAGGGCAGCAGGGTGGCCTCTGGGAGGCCAGGATG
GCACTGTTGGCACCGAGGTTGGGGGCAGAGGCCCATCTGGCCTGAACTGAG
GCTCCAGCATCTAGTGGTGGACCGGCCGGTCACTGCAGGGGTCTGGTGGTC
TCTGCTTGCATCCCCAACTTAGCTGTCCCCTGACCCAGAGCCTAGGGGATC
CGGGGCTTGTACAGAAGAGACAGTCCAAGGGGACTGGATCCCAGCAGTGAT
GTTGGTTGAGGCAGCAAACAGATGGCAGGATGGGCACTGCCGAGAACAGCA
TTGGTCCCAGAGCCCTGGGCATCAGACCTTAACCACCAGGCCCACAGCCCA
GCGAGGGAGAGGTCGTGAGGCCAGCTCCCGGGGCCCCTGTAACCCTACTCT
CCTCTCTCCCTGGACCTCAGAGGTGACACCCATTGGGCCCTTCCGGCATGC
CCCCAGTTACTGTAAATGTGGCCCCCAGTGGGCATGGAGCCAGTGCCTGTG
GTTGTTTCTCCAGAGTCAAAAGGGAAGTCGAGGGATGGGGCGTCGTCAGCT
GGCACTGTCTCTGCTGCAGCGGCCACACTGTACTCTGCACTGGTGTGAGGG
CCCCTGCCTGGACTGTGGGACCCTCCTGGTGCTGCCCACCTTCCCTGTCCT
GTAGCCCCCTCGGTGGGCCCAGGGCCTAGGGCCCAGGATCAAGTCACTCAT
CTCAGAATGTCCCCACCAATCCCCGCCACAGCAGGCGCCTCGGGTCCCAGA
TGTCTGCAGCCCTCAGCAGCTGCAGACCGCCCCTCACCAACCCAGAGAACC
TGCTTTACTTTGCCCAGGGACTTCCTCCCCATGTGAACATGGGGAACTTCG
GGCCCTGCCTGGAGTCCTTGACCGCTCTCTGTGGGCCCCACCCACTCTGTC
CTGGGAAATGAAGAAGCATCTTCCTTAGGTCTGCCCTGCTTGCAAATCCAC
TAGCACCGACCCCACCACCTGGTTCCGGCTCTGCACGCTTTGGGGTGTGGA
TGTCGAGAGGCACCACGGCCTCACCCAGGCATCTGCTTTACTCTGGACCAT
AGGAAACAAGACCGTTTGGAGGTTTCATCAGGATTTTGGGTTTTTCACATT
TCACGCTAAGGAGTAGTGGCCCTGACTTCCGGTCGGCTGGCCAGCTGACTC
CCTAGGGCCTTCAGACGTGTATGCAAATGAGTGATGGATAAGGATGAGTCT
TGGAGTTGCGGGCAGCCTGGAGACTCGTGGACTTACCGCCTGGAGGCAGGC
CCGGGAAGGCTGCTGTTTACTCATCGGGCAGCCACGTGCTCTCTGGAGGAA
GTGATAGTTTCTGAAACCGCTCAGATGTTTTGGGGAAAGTTGGAGAAGCCG
TGGCCTTGCGAGAGGTGGTTACACCAGAACCTGGACATTGGCCAGAAGAAG
CTTAAGTGGGCAGACACTGTTTGCCCAGTGTTTGTGCAAGGATGGAGTGGG
TGTCTCTGCATCACCCACAGCCGCAGCTGTAAGGCACGCTGGAAGGCACAC
GCCTGCCAGGCAGGGCAGTCTGGCGCCCATGATGGGAGGGATTGACATGTT
TCAACAAAATAATGCACTTCCTTACCTAGTGGCCCTTCACACAACTTTTGA
ATCTCTAAAAATCCATAAAATCCTTAAAGAACTGTAA

[0349] By “cluster of differentiation 33 (CD33)” is meant a protein having at least about 85% amino acid sequence identity to NCBI Accession No. NP_001763.3 or fragment thereof and having immunomodulatory activity. An exemplary amino acid sequence is provided below.

>NP 001763.3 myeloid cell surface antigen CD33 isoform 1 precursor [Homo sapiens]

MPLLLLLPLLWAGALAMDPNFWLQVQESVTVQEGLCVLVPCTFFHPIPYYD
KNSPVHGYWFREGAIISRDSPVATNKLDQEVQEETQGRFRLLGDPSRNNCS
LSIVDARRRDNGSYFFRMERGSTKYSYKSPQLSVHVTDLTHRPKILIPGTL
EPGHSKNLTCSVSWACEQGTPPIFSWLSAAPTSLGPRTTHSSVLIITPRPQ
DHGTNLTCQVKFAGAGVTTERTIQLNVTYVPQNPTTGIFPGDGSGKQETRA
GVVHGAIGGAGVTALLALCLCLIFFIVKTHRRKAARTAVGRNDTHPTTGSA
SPKHQKKSKLHGPTETSSCSGAAPTVEMDEELHYASLNFHGMNPSKDTSTE
YSEVRTQ

[0350] By “cluster of differentiation 33 (CD33)” is meant a nucleic acid encoding a CD33 polypeptide. An exemplary CD33 nucleic acid sequence is provided below. >NM_001772.4 Homo sapiens CD33 molecule (CD33), transcript variant 1, mRNA

CTGCTCACACAGGAAGCCCTGGAAGCTGCTTCCTCAGACATGCCGCTG
CTGCTACTGCTGCCCCTGCTGTGGGCAGGGGCCCTGGCTATGGATCCA
AATTTCTGGCTGCAAGTGCAGGAGTCAGTGACGGTACAGGAGGGTTTG
TGCGTCCTCGTGCCCTGCACTTTCTTCCATCCCATACCCTACTACGAC
AAGAACTCCCCAGTTCATGGTTACTGGTTCCGGGAAGGAGCCATTATA
TCCAGGGACTCTCCAGTGGCCACAAACAAGCTAGATCAAGAAGTACAG
GAGGAGACTCAGGGCAGATTCCGCCTCCTTGGGGATCCCAGTAGGAAC
AACTGCTCCCTGAGCATCGTAGACGCCAGGAGGAGGGATAATGGTTCA
TACTTCTTTCGGATGGAGAGAGGAAGTACCAAATACAGTTACAAATCT
CCCCAGCTCTCTGTGCATGTGACAGACTTGACCCACAGGCCCAAAATC
CTCATCCCTGGCACTCTAGAACCCGGCCACTCCAAAAACCTGACCTGC
TCTGTGTCCTGGGCCTGTGAGCAGGGAACACCCCCGATCTTCTCCTGG
TTGTCAGCTGCCCCCACCTCCCTGGGCCCCAGGACTACTCACTCCTCG
GTGCTCATAATCACCCCACGGCCCCAGGACCACGGCACCAACCTGACC
TGTCAGGTGAAGTTCGCTGGAGCTGGTGTGACTACGGAGAGAACCATC
CAGCTCAACGTCACCTATGTTCCACAGAACCCAACAACTGGTATCTTT
CCAGGAGATGGCTCAGGGAAACAAGAGACCAGAGCAGGAGTGGTTCAT
GGGGCCATTGGAGGAGCTGGTGTTACAGCCCTGCTCGCTCTTTGTCTC
TGCCTCATCTTCTTCATAGTGAAGACCCACAGGAGGAAAGCAGCCAGG
ACAGCAGTGGGCAGGAATGACACCCACCCTACCACAGGGTCAGCCTCC
CCGAAACACCAGAAGAAGTCCAAGTTACATGGCCCCACTGAAACCTCA
AGCTGTTCAGGTGCCGCCCCTACTGTGGAGATGGATGAGGAGCTGCAT
TATGCTTCCCTCAACTTTCATGGGATGAATCCTTCCAAGGACACCTCC
ACCGAATACTCAGAGGTCAGGACCCAGTGAGGAACCCACAAGAGCATC
AGGCTCAGCTAGAAGATCCACATCCTCTACAGGTCGGGGACCAAAGGC
TGATTCTTGGAGATTTAACACCCCACAGGCAATGGGTTTATAGACATT
ATGTGAGTTTCCTGCTATATTAACATCATCTTAGACTTTGCAAGCAGA
GAGTCGTGGAATCAAATCTGTGCTCTTTCATTTGCTAAGTGTATGATG
TCACACAAGCTCCTTAACCTTCCATGTCTCCATTTTCTTCTCTGTGAA
GTAGGTATAAGAAGTCCTATCTCATAGGGATGCTGTGAGCATTAAATA
AAGGTACACATGGAAAACACCA

[0351] By “cluster of differentiation 52 (CD52)” is meant a protein having at least about 85% amino acid sequence identity to NCBI Accession No. NP_001794.2 or fragment thereof and having immunomodulatory activity. An exemplary amino acid sequence is provided below.

>NP_001794.2 CAMPATH-1 antigen precursor [Homo sapiens]

MKRFLFLLLTISLLVMVQIQTGLSGQNDTSQTSSPSASSNISGGIFLFFVA
NAIIHLFCFS

[0352] By “cluster of differentiation 52 (CD52)” is meant a nucleic acid encoding a CD52 polypeptide. An exemplary CD52 nucleic acid sequence is provided below. >NM_001803.3 Homo sapiens CD52 molecule (CD52), mRNA

AGACAGCCCTGAGATCACCTAAAAAGCTGCTACCAAGACAGCCACGAA
GATCCTACCAAAATGAAGCGCTTCCTCTTCCTCCTACTCACCATCAGC
CTCCTGGTTATGGTACAGATACAAACTGGACTCTCAGGACAAAACGAC
ACCAGCCAAACCAGCAGCCCCTCAGCATCCAGCAACATAAGCGGAGGC
ATTTTCCTTTTCTTCGTGGCCAATGCCATAATCCACCTCTTCTGCTTC
AGTTGAGGTGACACGTCTCAGCCTTAGCCCTGTGCCCCCTGAAACAGC
TGCCACCATCACTCGCAAGAGAATCCCCTCCATCTTTGGGAGGGGTTG
ATGCCAGACATCACCAGGTTGTAGAAGTTGACAGGCAGTGCCATGGGG
GCAACAGCCAAAATAGGGGGGTAATGATGTAGGGGCCAAGCAGTGCCC
AGCTGGGGGTCAATAAAGTTACCCTTGTACTTGCA

[0353] By “cluster of differentiation 70 (CD70)” is meant a protein having at least about 85% amino acid sequence identity to NCBI Accession No. NP_001243.1 or fragment thereof and having immunomodulatory activity. An exemplary amino acid sequence is provided below.

>NP_001243.1 CD70 antigen isoform 1 [Homo sapiens]

MPEEGSGCSVRRRPYGCVLRAALVPLVAGLVICLVVCIQRFAQAQQQL
PLESLGWDVAELQLNHTGPQQDPRLYWQGGPALGRSFLHGPELDKGQL
RIHRDGIYMVHIQVTLAICSSTTASRHHPTTLAVGICSPASRSISLLR
LSFHQGCTIASQRLTPLARGDTLCTNLTGTLLPSRNTDETFFGVQWVRP

[0354] By “cluster of differentiation 70 (CD70)” is meant a nucleic acid encoding a CD70 polypeptide. An exemplary CD70 nucleic acid sequence is provided below. >NM_001252.5 Homo sapiens CD70 molecule (CD70), transcript variant 1, mRNA

AGAGAGGGGCAGGCTGGTCCCCTGACAGGTTGAAGCAAGTAGACGCC
CAGGAGCCCCGGGAGGGGGCTGCAGTTTCCTTCCTTCCTTCTCGGCA
GCGCTCCGCGCCCCCATCGCCCCTCCTGCGCTAGCGGAGGTGATCGC
CGCGGCGATGCCGGAGGAGGGTTCGGGCTGCTCGGTGCGGCGCAGGC
CCTATGGGTGCGTCCTGCGGGCTGCTTTGGTCCCATTGGTCGCGGGC
TTGGTGATCTGCCTCGTGGTGTGCATCCAGCGCTTCGCACAGGCTCA
GCAGCAGCTGCCGCTCGAGTCACTTGGGTGGGACGTAGCTGAGCTGC
AGCTGAATCACACAGGACCTCAGCAGGACCCCAGGCTATACTGGCAG
GGGGGCCCAGCACTGGGCCGCTCCTTCCTGCATGGACCAGAGCTGGA
CAAGGGGCAGCTACGTATCCATCGTGATGGCATCTACATGGTACACA
TCCAGGTGACGCTGGCCATCTGCTCCTCCACGACGGCCTCCAGGCAC
CACCCCACCACCCTGGCCGTGGGAATCTGCTCTCCCGCCTCCCGTAG
CATCAGCCTGCTGCGTCTCAGCTTCCACCAAGGTTGTACCATTGCCT
CCCAGCGCCTGACGCCCCTGGCCCGAGGGGACACACTCTGCACCAAC
CTCACTGGGACACTTTTGCCTTCCCGAAACACTGATGAGACCTTCTT
TGGAGTGCAGTGGGTGCGCCCCTGACCACTGCTGCTGATTAGGGTTT
TTTAAATTTTATTTTATTTTATTTAAGTTCAAGAGAAAAAGTGTACA
CACAGGGGCCACCCGGGGTTGGGGTGGGAGTGTGGTGGGGGGTAGTG
GTGGCAGGACAAGAGAAGGCATTGAGCTTTTTCTTTCATTTTCCTAT
TAAAAAATACAAAAATCA

[0355] By “class II, major histocompatibility complex, transactivator (CIITA)” is meant a protein having at least about 85% amino acid sequence identity to NCBI Accession No. NP_001273331.1 or fragment thereof and having immunomodulatory activity. An exemplary amino acid sequence is provided below.

>NP_001273331.1 MHC class II transactivator isoform 1 [Homo sapiens]

MRCLAPRPAGSYLSEPQGSSQCATMELGPLEGGYLELLNSDADPLCLYHFY
DQMDLAGEEEIELYSEPDTDTINCDQFSRLLCDMEGDEETREAYANIAELD
QYVFQDSQLEGLSKDIFIEHIGPDEVIGESMEMPAEVGQKSQKRPFPEELP
ADLKHWKPAEPPTVVTGSLLVGPVSDCSTLPCLPLPALFNQEPASGQMRLE
KTDQIPMPFSSSSLSCLNLPEGPIQFVPTISTLPHGLWQISEAGTGVSSIF
IYHGEVPQASQVPPPSGFTVHGLPTSPDRPGSTSPFAPSATDLPSMPEPAL
TSRANMTEHKTSPTQCPAAGEVSNKLPKWPEPVEQFYRSLQDTYGAEPAGP
DGILVEVDLVQARLERSSSKSLERELATPDWAERQLAQGGLAEVLLAAKEH
RRPRETRVIAVLGKAGQGKSYWAGAVSRAWACGRLPQYDFVFSVPCHCLNR
PGDAYGLQDLLFSLGPQPLVAADEVFSHILKRPDRVLLILDGFEELEAQDG
FLHSTCGPAPAEPCSLRGLLAGLFQKKLLRGCTLLLTARPRGRLVQSLSKA
DALFELSGFSMEQAQAYVMRYFESSGMTEHQDRALTLLRDRPLLLSHSHSP
TLCRAVCQLSEALLELGEDAKLPSTLTGLYVGLLGRAALDSPPGALAELAK
LAWELGRRHQSTLQEDQFPSADVRTWAMAKGLVQHPPRAAESELAFPSFLL
QCFLGALWLALSGEIKDKELPQYLALTPRKKRPYDNWLEGVPRFLAGLIFQ
PPARCLGALLGPSAAASVDRKQKVLARYLKRLQPGTLRARQLLELLHCAHE
AEEAGIWQHVVQELPGRLSFLGTRLTPPDAHVLGKALEAAGQDFSLDLRST
GICPSGLGSLVGLSCVTRFRAALSDTVALWESLQQHGETKLLQAAEEKFTI
EPFKAKSLKDVEDLGKLVQTQRTRSSSEDTAGELPAVRDLKKLEFALGPVS
GPQAFPKLVRILTAFSSLQHLDLDALSENKIGDEGVSQLSATFPQLKSLET
LNLSQNNITDLGAYKLAEALPSLAASLLRLSLYNNCICDVGAESLARVLPD
MVSLRVMDVQYNKFTAAGAQQLAASLRRCPHVETLAMWTPTIPFSVQEHLQ
QQDSRISLR

[0356] By “class II, major histocompatibility complex, transactivator (CIITA)” is meant a nucleic acid encoding a CIITA polypeptide. An exemplary CIITA nucleic acid sequence is provided below.

>NM_001286402.1 Homo sapiens class II major histocompatibility complex transactivator (CIITA), transcript variant 1, mRNA

GGTTAGTGATGAGGCTAGTGATGAGGCTGTGTGCTTCTGAGCTGGGCATCC
GAAGGCATCCTTGGGGAAGCTGAGGGCACGAGGAGGGGCTGCCAGACTCCG
GGAGCTGCTGCCTGGCTGGGATTCCTACACAATGCGTTGCCTGGCTCCACG
CCCTGCTGGGTCCTACCTGTCAGAGCCCCAAGGCAGCTCACAGTGTGCCAC
CATGGAGTTGGGGCCCCTAGAAGGTGGCTACCTGGAGCTTCTTAACAGCGA
TGCTGACCCCCTGTGCCTCTACCACTTCTATGACCAGATGGACCTGGCTGG
AGAAGAAGAGATTGAGCTCTACTCAGAACCCGACACAGACACCATCAACTG
CGACCAGTTCAGCAGGCTGTTGTGTGACATGGAAGGTGATGAAGAGACCAG
GGAGGCTTATGCCAATATCGCGGAACTGGACCAGTATGTCTTCCAGGACTC
CCAGCTGGAGGGCCTGAGCAAGGACATTTTCATAGAGCACATAGGACCAGA
TGAAGTGATCGGTGAGAGTATGGAGATGCCAGCAGAAGTTGGGCAGAAAAG
TCAGAAAAGACCCTTCCCAGAGGAGCTTCCGGCAGACCTGAAGCACTGGAA
GCCAGCTGAGCCCCCCACTGTGGTGACTGGCAGTCTCCTAGTGGGACCAGT
GAGCGACTGCTCCACCCTGCCCTGCCTGCCACTGCCTGCGCTGTTCAACCA
GGAGCCAGCCTCCGGCCAGATGCGCCTGGAGAAAACCGACCAGATTCCCAT
GCCTTTCTCCAGTTCCTCGTTGAGCTGCCTGAATCTCCCTGAGGGACCCAT
CCAGTTTGTCCCCACCATCTCCACTCTGCCCCATGGGCTCTGGCAAATCTC
TGAGGCTGGAACAGGGGTCTCCAGTATATTCATCTACCATGGTGAGGTGCC
CCAGGCCAGCCAAGTACCCCCTCCCAGTGGATTCACTGTCCACGGCCTCCC
AACATCTCCAGACCGGCCAGGCTCCACCAGCCCCTTCGCTCCATCAGCCAC
TGACCTGCCCAGCATGCCTGAACCTGCCCTGACCTCCCGAGCAAACATGAC
AGAGCACAAGACGTCCCCCACCCAATGCCCGGCAGCTGGAGAGGTCTCCAA
CAAGCTTCCAAAATGGCCTGAGCCGGTGGAGCAGTTCTACCGCTCACTGCA
GGACACGTATGGTGCCGAGCCCGCAGGCCCGGATGGCATCCTAGTGGAGGT
GGATCTGGTGCAGGCCAGGCTGGAGAGGAGCAGCAGCAAGAGCCTGGAGCG
GGAACTGGCCACCCCGGACTGGGCAGAACGGCAGCTGGCCCAAGGAGGCCT
GGCTGAGGTGCTGTTGGCTGCCAAGGAGCACCGGCGGCCGCGTGAGACACG
AGTGATTGCTGTGCTGGGCAAAGCTGGTCAGGGCAAGAGCTATTGGGCTGG
GGCAGTGAGCCGGGCCTGGGCTTGTGGCCGGCTTCCCCAGTACGACTTTGT
CTTCTCTGTCCCCTGCCATTGCTTGAACCGTCCGGGGGATGCCTATGGCCT
GCAGGATCTGCTCTTCTCCCTGGGCCCACAGCCACTCGTGGCGGCCGATGA
GGTTTTCAGCCACATCTTGAAGAGACCTGACCGCGTTCTGCTCATCCTAGA
CGGCTTCGAGGAGCTGGAAGCGCAAGATGGCTTCCTGCACAGCACGTGCGG
ACCGGCACCGGCGGAGCCCTGCTCCCTCCGGGGGCTGCTGGCCGGCCTTTT
CCAGAAGAAGCTGCTCCGAGGTTGCACCCTCCTCCTCACAGCCCGGCCCCG
GGGCCGCCTGGTCCAGAGCCTGAGCAAGGCCGACGCCCTATTTGAGCTGTC
CGGCTTCTCCATGGAGCAGGCCCAGGCATACGTGATGCGCTACTTTGAGAG
CTCAGGGATGACAGAGCACCAAGACAGAGCCCTGACGCTCCTCCGGGACCG
GCCACTTCTTCTCAGTCACAGCCACAGCCCTACTTTGTGCCGGGCAGTGTG
CCAGCTCTCAGAGGCCCTGCTGGAGCTTGGGGAGGACGCCAAGCTGCCCTC
CACGCTCACGGGACTCTATGTCGGCCTGCTGGGCCGTGCAGCCCTCGACAG
CCCCCCCGGGGCCCTGGCAGAGCTGGCCAAGCTGGCCTGGGAGCTGGGCCG
CAGACATCAAAGTACCCTACAGGAGGACCAGTTCCCATCCGCAGACGTGAG
GACCTGGGCGATGGCCAAAGGCTTAGTCCAACACCCACCGCGGGCCGCAGA
GTCCGAGCTGGCCTTCCCCAGCTTCCTCCTGCAATGCTTCCTGGGGGCCCT
GTGGCTGGCTCTGAGTGGCGAAATCAAGGACAAGGAGCTCCCGCAGTACCT
AGCATTGACCCCAAGGAAGAAGAGGCCCTATGACAACTGGCTGGAGGGCGT
GCCACGCTTTCTGGCTGGGCTGATCTTCCAGCCTCCCGCCCGCTGCCTGGG
AGCCCTACTCGGGCCATCGGCGGCTGCCTCGGTGGACAGGAAGCAGAAGGT
GCTTGCGAGGTACCTGAAGCGGCTGCAGCCGGGGACACTGCGGGCGCGGCA
GCTGCTGGAGCTGCTGCACTGCGCCCACGAGGCCGAGGAGGCTGGAATTTG
GCAGCACGTGGTACAGGAGCTCCCCGGCCGCCTCTCTTTTCTGGGCACCCG
CCTCACGCCTCCTGATGCACATGTACTGGGCAAGGCCTTGGAGGCGGCGGG
CCAAGACTTCTCCCTGGACCTCCGCAGCACTGGCATTTGCCCCTCTGGATT
GGGGAGCCTCGTGGGACTCAGCTGTGTCACCCGTTTCAGGGCTGCCTTGAG
CGACACGGTGGCGCTGTGGGAGTCCCTGCAGCAGCATGGGGAGACCAAGCT
ACTTCAGGCAGCAGAGGAGAAGTTCACCATCGAGCCTTTCAAAGCCAAGTC
CCTGAAGGATGTGGAAGACCTGGGAAAGCTTGTGCAGACTCAGAGGACGAG
AAGTTCCTCGGAAGACACAGCTGGGGAGCTCCCTGCTGTTCGGGACCTAAA
GAAACTGGAGTTTGCGCTGGGCCCTGTCTCAGGCCCCCAGGCTTTCCCCAA
ACTGGTGCGGATCCTCACGGCCTTTTCCTCCCTGCAGCATCTGGACCTGGA
TGCGCTGAGTGAGAACAAGATCGGGGACGAGGGTGTCTCGCAGCTCTCAGC
CACCTTCCCCCAGCTGAAGTCCTTGGAAACCCTCAATCTGTCCCAGAACAA
CATCACTGACCTGGGTGCCTACAAACTCGCCGAGGCCCTGCCTTCGCTCGC
TGCATCCCTGCTCAGGCTAAGCTTGTACAATAACTGCATCTGCGACGTGGG
AGCCGAGAGCTTGGCTCGTGTGCTTCCGGACATGGTGTCCCTCCGGGTGAT
GGACGTCCAGTACAACAAGTTCACGGCTGCCGGGGCCCAGCAGCTCGCTGC
CAGCCTTCGGAGGTGTCCTCATGTGGAGACGCTGGCGATGTGGACGCCCAC
CATCCCATTCAGTGTCCAGGAACACCTGCAACAACAGGATTCACGGATCAG
CCTGAGATGATCCCAGCTGTGCTCTGGACAGGCATGTTCTCTGAGGACACT
AACCACGCTGGACCTTGAACTGGGTACTTGTGGACACAGCTCTTCTCCAGG
CTGTATCCCATGAGCCTCAGCATCCTGGCACCCGGCCCCTGCTGGTTCAGG
GTTGGCCCCTGCCCGGCTGCGGAATGAACCACATCTTGCTCTGCTGACAGA
CACAGGCCCGGCTCCAGGCTCCTTTAGCGCCCAGTTGGGTGGATGCCTGGT
GGCAGCTGCGGTCCACCCAGGAGCCCCGAGGCCTTCTCTGAAGGACATTGC
GGACAGCCACGGCCAGGCCAGAGGGAGTGACAGAGGCAGCCCCATTCTGCC
TGCCCAGGCCCCTGCCACCCTGGGGAGAAAGTACTTCTTTTTTTTTATTTT
TAGACAGAGTCTCACTGTTGCCCAGGCTGGCGTGCAGTGGTGCGATCTGGG
TTCACTGCAACCTCCGCCTCTTGGGTTCAAGCGATTCTTCTGCTTCAGCCT
CCCGAGTAGCTGGGACTACAGGCACCCACCATCATGTCTGGCTAATTTTTC
ATTTTTAGTAGAGACAGGGTTTTGCCATGTTGGCCAGGCTGGTCTCAAACT
CTTGACCTCAGGTGATCCACCCACCTCAGCCTCCCAAAGTGCTGGGATTAC
AAGCGTGAGCCACTGCACCGGGCCACAGAGAAAGTACTTCTCCACCCTGCT
CTCCGACCAGACACCTTGACAGGGCACACCGGGCACTCAGAAGACACTGAT
GGGCAACCCCCAGCCTGCTAATTCCCCAGATTGCAACAGGCTGGGCTTCAG
TGGCAGCTGCTTTTGTCTATGGGACTCAATGCACTGACATTGTTGGCCAAA
GCCAAAGCTAGGCCTGGCCAGATGCACCAGCCCTTAGCAGGGAAACAGCTA
ATGGGACACTAATGGGGCGGTGAGAGGGGAACAGACTGGAAGCACAGCTTC
ATTTCCTGTGTCTTTTTTCACTACATTATAAATGTCTCTTTAATGTCACAG
GCAGGTCCAGGGTTTGAGTTCATACCCTGTTACCATTTTGGGGTACCCACT
GCTCTGGTTATCTAATATGTAACAAGCCACCCCAAATCATAGTGGCTTAAA
ACAACACTCACATTTA

[0357] By “cytotoxic T-lymphocyte associated protein 4 (CTLA-4) polypeptide” is meant a protein having at least about 85% sequence identity to NCBI Accession No. EAW70354.1 or a fragment thereof. An exemplary amino acid sequence is provided below:

>EAW70354.1 cytotoxic T-lymphocyte-associated protein 4 [Homo sapiens]

MACLGFQRHKAQLNLATRTWPCTLLFFLLFIPVFCKAMHVAQPAVVLASS
RGIASFVCEYASPGKATEVRVTVLRQADSQVTEVCAATYMMGNELTFLDD
SICTGTSSGNQVNLTIQGLRAMDTGLYICKVELMYPPPYYLGIGNGTQIY
VIDPEPCPDSDFLLWILAAVSSGLFFYSFLLTAVSLSKMLKKRSPLTTGV
YVKMPPTEPECEKQFQPYFIPIN

[0358] By “cytotoxic T-lymphocyte associated protein 4 (CTLA-4) polynucleotide” is meant a nucleic acid molecule encoding a CTLA-4 polypeptide. The CTLA-4 gene encodes an immunoglobulin superfamily and encodes a protein which transmits an inhibitory signal to T cells. An exemplary CTLA-4 nucleic acid sequence is provided below.

>BC074842.2 Homo sapiens cytotoxic T-lymphocyte-associated protein 4, mRNA (cDNA clone MGC:104099 IMAGE:30915552), complete cds

GACCTGAACACCGCTCCCATAAAGCCATGGCTTGCCTTGGATTTCAGCGGC
ACAAGGCTCAGCTGAACCTGGCTACCAGGACCTGGCCCTGCACTCTCCTGT
TTTTTCTTCTCTTCATCCCTGTCTTCTGCAAAGCAATGCACGTGGCCCAGC
CTGCTGTGGTACTGGCCAGCAGCCGAGGCATCGCCAGCTTTGTGTGTGAGT
ATGCATCTCCAGGCAAAGCCACTGAGGTCCGGGTGACAGTGCTTCGGCAGG
CTGACAGCCAGGTGACTGAAGTCTGTGCGGCAACCTACATGATGGGGAATG
AGTTGACCTTCCTAGATGATTCCATCTGCACGGGCACCTCCAGTGGAAATC
AAGTGAACCTCACTATCCAAGGACTGAGGGCCATGGACACGGGACTCTACA
TCTGCAAGGTGGAGCTCATGTACCCACCGCCATACTACCTGGGCATAGGCA
ACGGAACCCAGATTTATGTAATTGATCCAGAACCGTGCCCAGATTCTGACT
TCCTCCTCTGGATCCTTGCAGCAGTTAGTTCGGGGTTGTTTTTTTATAGCT
TTCTCCTCACAGCTGTTTCTTTGAGCAAAATGCTAAAGAAAAGAAGCCCTC
TTACAACAGGGGTCTATGTGAAAATGCCCCCAACAGAGCCAGAATGTGAAA
AGCAATTTCAGCCTTATTTTATTCCCATCAATTGAGAAACCATTATGAAGA
AGAGAGTCCATATTTCAATTTCCAAGAGCTGAGG

[0359] By “cytidine deaminase” is meant a polypeptide or fragment thereof capable of catalyzing a deamination reaction that converts an amino group to a carbonyl group. In one embodiment, the cytidine deaminase converts cytosine to uracil or 5-methylcytosine to thymine. PmCDA1 derived from Petromyzon marinus (Petromyzon marinus cytosine deaminase 1), or AID (Activation-induced cytidine deaminase; AICDA) derived from mammal (e.g., human, swine, bovine, horse, monkey etc.), and APOBEC are exemplary cytidine deaminases.

[0360] The base sequence and amino acid sequence of PmCDA1 and the base sequence and amino acid sequence of human AID are shown below.

>tr|A5H718|A5H718_PETMA Cytosine deaminase OS=Petromyzon marinus OX=7757 PE=2 SV=1

MTDAEYVRIHEKLDIYTFKKQFFNNKKSVSHRCYVLFELKRRGERRACFW
GYAVNKPQSGTERGIHAEIFSIRKVEEYLRDNPGQFTINWYSSWSPCADC
AEKILEWYNQELRGNGHTLKIWACKLYYEKNARNQIGLWNLRDNGVGLNV
MVSEHYQCCRKIFIQSSHNQLNENRWLEKTLKRAEKRRSELSIMIQVKIL
HTTKSPAV

>EF094822.1 Petromyzon marinus isolate PmCDA.21 cytosine deaminase mRNA, complete cds

TGACACGACACAGCCGTGTATATGAGGAAGGGTAGCTGGATGGGGGGGGGG
GGAATACGTTCAGAGAGGACATTAGCGAGCGTCTTGTTGGTGGCCTTGAGT
CTAGACACCTGCAGACATGACCGACGCTGAGTACGTGAGAATCCATGAGAA
GTTGGACATCTACACGTTTAAGAAACAGTTTTTCAACAACAAAAAATCCGT
GTCGCATAGATGCTACGTTCTCTTTGAATTAAAACGACGGGGTGAACGTAG
AGCGTGTTTTTGGGGCTATGCTGTGAATAAACCACAGAGCGGGACAGAACG
TGGAATTCACGCCGAAATCTTTAGCATTAGAAAAGTCGAAGAATACCTGCG
CGACAACCCCGGACAATTCACGATAAATTGGTACTCATCCTGGAGTCCTTG
TGCAGATTGCGCTGAAAAGATCTTAGAATGGTATAACCAGGAGCTGCGGGG
GAACGGCCACACTTTGAAAATCTGGGCTTGCAAACTCTATTACGAGAAAAA
TGCGAGGAATCAAATTGGGCTGTGGAACCTCAGAGATAACGGGGTTGGGTT
GAATGTAATGGTAAGTGAACACTACCAATGTTGCAGGAAAATATTCATCCA
ATCGTCGCACAATCAATTGAATGAGAATAGATGGCTTGAGAAGACTTTGAA
GCGAGCTGAAAAACGACGGAGCGAGTTGTCCATTATGATTCAGGTAAAAAT
ACTCCACACCACTAAGAGTCCTGCTGTTTAAGAGGCTATGCGGATGGTTTT
C

>tr|Q6QJ80|Q6QJ80 HUMAN Activation-induced cytidine deaminase OS═Homo sapiens OX=9606 GN=AICDA PE=2 SV=1

MDSLLMNRRKFLYQFKNVRWAKGRRETYLCYVVKRRDSATSFSLDFGYLR
NKNGCHVELLFLRYISDWDLDPGRCYRVTWFTSWSPCYDCARHVADFLRG
NPNLSLRIFTARLYFCEDRKAEPEGLRRLHRAGVQIAIMTFKAPV

>NG_011588.1:5001-15681 Homo sapiens activation induced cytidine deaminase (AICDA), RefSeqGene (LRG_17) on chromosome 12

AGAGAACCATCATTAATTGAAGTGAGATTTTTCTGGCCTGAGACTTGCAG
GGAGGCAAGAAGACACTCTGGACACCACTATGGACAGGTAAAGAGGCAGT
CTTCTCGTGGGTGATTGCACTGGCCTTCCTCTCAGAGCAAATCTGAGTAA
TGAGACTGGTAGCTATCCCTTTCTCTCATGTAACTGTCTGACTGATAAGA
TCAGCTTGATCAATATGCATATATATTTTTTGATCTGTCTCCTTTTCTTC
TATTCAGATCTTATACGCTGTCAGCCCAATTCTTTCTGTTTCAGACTTCT
CTTGATTTCCCTCTTTTTCATGTGGCAAAAGAAGTAGTGCGTACAATGTA
CTGATTCGTCCTGAGATTTGTACCATGGTTGAAACTAATTTATGGTAATA
ATATTAACATAGCAAATCTTTAGAGACTCAAATCATGAAAAGGTAATAGC
AGTACTGTACTAAAAACGGTAGTGCTAATTTTCGTAATAATTTTGTAAAT
ATTCAACAGTAAAACAACTTGAAGACACACTTTCCTAGGGAGGCGTTACT
GAAATAATTTAGCTATAGTAAGAAAATTTGTAATTTTAGAAATGCCAAGC
ATTCTAAATTAATTGCTTGAAAGTCACTATGATTGTGTCCATTATAAGGA
GACAAATTCATTCAAGCAAGTTATTTAATGTTAAAGGCCCAATTGTTAGG
CAGTTAATGGCACTTTTACTATTAACTAATCTTTCCATTTGTTCAGACGT
AGCTTAACTTACCTCTTAGGTGTGAATTTGGTTAAGGTCCTCATAATGTC
TTTATGTGCAGTTTTTGATAGGTTATTGTCATAGAACTTATTCTATTCCT
ACATTTATGATTACTATGGATGTATGAGAATAACACCTAATCCTTATACT
TTACCTCAATTTAACTCCTTTATAAAGAACTTACATTACAGAATAAAGAT
TTTTTAAAAATATATTTTTTTGTAGAGACAGGGTCTTAGCCCAGCCGAGG
CTGGTCTCTAAGTCCTGGCCCAAGCGATCCTCCTGCCTGGGCCTCCTAAA
GTGCTGGAATTATAGACATGAGCCATCACATCCAATATACAGAATAAAGA
TTTTTAATGGAGGATTTAATGTTCTTCAGAAAATTTTCTTGAGGTCAGAC
AATGTCAAATGTCTCCTCAGTTTACACTGAGATTTTGAAAACAAGTCTGA
GCTATAGGTCCTTGTGAAGGGTCCATTGGAAATACTTGTTCAAAGTAAAA
TGGAAAGCAAAGGTAAAATCAGCAGTTGAAATTCAGAGAAAGACAGAAAA
GGAGAAAAGATGAAATTCAACAGGACAGAAGGGAAATATATTATCATTAA
GGAGGACAGTATCTGTAGAGCTCATTAGTGATGGCAAAATGACTTGGTCA
GGATTATTTTTAACCCGCTTGTTTCTGGTTTGCACGGCTGGGGATGCAGC
TAGGGTTCTGCCTCAGGGAGCACAGCTGTCCAGAGCAGCTGTCAGCCTGC
AAGCCTGAAACACTCCCTCGGTAAAGTCCTTCCTACTCAGGACAGAAATG
ACGAGAACAGGGAGCTGGAAACAGGCCCCTAACCAGAGAAGGGAAGTAAT
GGATCAACAAAGTTAACTAGCAGGTCAGGATCACGCAATTCATTTCACTC
TGACTGGTAACATGTGACAGAAACAGTGTAGGCTTATTGTATTTTCATGT
AGAGTAGGACCCAAAAATCCACCCAAAGTCCTTTATCTATGCCACATCCT
TCTTATCTATACTTCCAGGACACTTTTTCTTCCTTATGATAAGGCTCTCT
CTCTCTCCACACACACACACACACACACACACACACACACACACACACAC
ACAAACACACACCCCGCCAACCAAGGTGCATGTAAAAAGATGTAGATTCC
TCTGCCTTTCTCATCTACACAGCCCAGGAGGGTAAGTTAATATAAGAGGG
ATTTATTGGTAAGAGATGATGCTTAATCTGTTTAACACTGGGCCTCAAAG
AGAGAATTTCTTTTCTTCTGTACTTATTAAGCACCTATTATGTGTTGAGC
TTATATATACAAAGGGTTATTATATGCTAATATAGTAATAGTAATGGTGG
TTGGTACTATGGTAATTACCATAAAAATTATTATCCTTTTAAAATAAAGC
TAATTATTATTGGATCTTTTTTAGTATTCATTTTATGTTTTTTATGTTTT
TGATTTTTTAAAAGACAATCTCACCCTGTTACCCAGGCTGGAGTGCAGTG
GTGCAATCATAGCTTTCTGCAGTCTTGAACTCCTGGGCTCAAGCAATCCT
CCTGCCTTGGCCTCCCAAAGTGTTGGGATACAGTCATGAGCCACTGCATC
TGGCCTAGGATCCATTTAGATTAAAATATGCATTTTAAATTTTAAAATAA
TATGGCTAATTTTTACCTTATGTAATGTGTATACTGGCAATAAATCTAGT
TTGCTGCCTAAAGTTTAAAGTGCTTTCCAGTAAGCTTCATGTACGTGAGG
GGAGACATTTAAAGTGAAACAGACAGCCAGGTGTGGTGGCTCACGCCTGT
AATCCCAGCACTCTGGGAGGCTGAGGTGGGTGGATCGCTTGAGCCCTGGA
GTTCAAGACCAGCCTGAGCAACATGGCAAAACGCTGTTTCTATAACAAAA
ATTAGCCGGGCATGGTGGCATGTGCCTGTGGTCCCAGCTACTAGGGGGCT
GAGGCAGGAGAATCGTTGGAGCCCAGGAGGTCAAGGCTGCACTGAGCAGT
GCTTGCGCCACTGCACTCCAGCCTGGGTGACAGGACCAGACCTTGCCTCA
AAAAAATAAGAAGAAAAATTAAAAATAAATGGAAACAACTACAAAGAGCT
GTTGTCCTAGATGAGCTACTTAGTTAGGCTGATATTTTGGTATTTAACTT
TTAAAGTCAGGGTCTGTCACCTGCACTACATTATTAAAATATCAATTCTC
AATGTATATCCACACAAAGACTGGTACGTGAATGTTCATAGTACCTTTAT
TCACAAAACCCCAAAGTAGAGACTATCCAAATATCCATCAACAAGTGAAC
AAATAAACAAAATGTGCTATATCCATGCAATGGAATACCACCCTGCAGTA
CAAAGAAGCTACTTGGGGATGAATCCCAAAGTCATGACGCTAAATGAAAG
AGTCAGACATGAAGGAGGAGATAATGTATGCCATACGAAATTCTAGAAAA
TGAAAGTAACTTATAGTTACAGAAAGCAAATCAGGGCAGGCATAGAGGCT
CACACCTGTAATCCCAGCACTTTGAGAGGCCACGTGGGAAGATTGCTAGA
ACTCAGGAGTTCAAGACCAGCCTGGGCAACACAGTGAAACTCCATTCTCC
ACAAAAATGGGAAAAAAAGAAAGCAAATCAGTGGTTGTCCTGTGGGGAGG
GGAAGGACTGCAAAGAGGGAAGAAGCTCTGGTGGGGTGAGGGTGGTGATT
CAGGTTCTGTATCCTGACTGTGGTAGCAGTTTGGGGTGTTTACATCCAAA
AATATTCGTAGAATTATGCATCTTAAATGGGTGGAGTTTACTGTATGTAA
ATTATACCTCAATGTAAGAAAAAATAATGTGTAAGAAAACTTTCAATTCT
CTTGCCAGCAAACGTTATTCAAATTCCTGAGCCCTTTACTTCGCAAATTC
TCTGCACTTCTGCCCCGTACCATTAGGTGACAGCACTAGCTCCACAAATT
GGATAAATGCATTTCTGGAAAAGACTAGGGACAAAATCCAGGCATCACTT
GTGCTTTCATATCAACCATGCTGTACAGCTTGTGTTGCTGTCTGCAGCTG
CAATGGGGACTCTTGATTTCTTTAAGGAAACTTGGGTTACCAGAGTATTT
CCACAAATGCTATTCAAATTAGTGCTTATGATATGCAAGACACTGTGCTA
GGAGCCAGAAAACAAAGAGGAGGAGAAATCAGTCATTATGTGGGAACAAC
ATAGCAAGATATTTAGATCATTTTGACTAGTTAAAAAAGCAGCAGAGTAC
AAAATCACACATGCAATCAGTATAATCCAAATCATGTAAATATGTGCCTG
TAGAAAGACTAGAGGAATAAACACAAGAATCTTAACAGTCATTGTCATTA
GACACTAAGTCTAATTATTATTATTAGACACTATGATATTTGAGATTTAA
AAAATCTTTAATATTTTAAAATTTAGAGCTCTTCTATTTTTCCATAGTAT
TCAAGTTTGACAATGATCAAGTATTACTCTTTCTTTTTTTTTTTTTTTTT
TTTTTTTTGAGATGGAGTTTTGGTCTTGTTGCCCATGCTGGAGTGGAATG
GCATGACCATAGCTCACTGCAACCTCCACCTCCTGGGTTCAAGCAAAGCT
GTCGCCTCAGCCTCCCGGGTAGATGGGATTACAGGCGCCCACCACCACAC
TCGGCTAATGTTTGTATTTTTAGTAGAGATGGGGTTTCACCATGTTGGCC
AGGCTGGTCTCAAACTCCTGACCTCAGAGGATCCACCTGCCTCAGCCTCC
CAAAGTGCTGGGATTACAGATGTAGGCCACTGCGCCCGGCCAAGTATTGC
TCTTATACATTAAAAAACAGGTGTGAGCCACTGCGCCCAGCCAGGTATTG
CTCTTATACATTAAAAAATAGGCCGGTGCAGTGGCTCACGCCTGTAATCC
CAGCACTTTGGGAAGCCAAGGCGGGCAGAACACCCGAGGTCAGGAGTCCA
AGGCCAGCCTGGCCAAGATGGTGAAACCCCGTCTCTATTAAAAATACAAA
CATTACCTGGGCATGATGGTGGGCGCCTGTAATCCCAGCTACTCAGGAGG
CTGAGGCAGGAGGATCCGCGGAGCCTGGCAGATCTGCCTGAGCCTGGGAG
GTTGAGGCTACAGTAAGCCAAGATCATGCCAGTATACTTCAGCCTGGGCG
ACAAAGTGAGACCGTAACAAAAAAAAAAAAATTTAAAAAAAGAAATTTAG
ATCAAGATCCAACTGTAAAAAGTGGCCTAAACACCACATTAAAGAGTTTG
GAGTTTATTCTGCAGGCAGAAGAGAACCATCAGGGGGTCTTCAGCATGGG
AATGGCATGGTGCACCTGGTTTTTGTGAGATCATGGTGGTGACAGTGTGG
GGAATGTTATTTTGGAGGGACTGGAGGCAGACAGACCGGTTAAAAGGCCA
GCACAACAGATAAGGAGGAAGAAGATGAGGGCTTGGACCGAAGCAGAGAA
GAGCAAACAGGGAAGGTACAAATTCAAGAAATATTGGGGGGTTTGAATCA
ACACATTTAGATGATTAATTAAATATGAGGACTGAGGAATAAGAAATGAG
TCAAGGATGGTTCCAGGCTGCTAGGCTGCTTACCTGAGGTGGCAAAGTCG
GGAGGAGTGGCAGTTTAGGACAGGGGGCAGTTGAGGAATATTGTTTTGAT
CATTTTGAGTTTGAGGTACAAGTTGGACACTTAGGTAAAGACTGGAGGGG
AAATCTGAATATACAATTATGGGACTGAGGAACAAGTTTATTTTATTTTT
TGTTTCGTTTTCTTGTTGAAGAACAAATTTAATTGTAATCCCAAGTCATC
AGCATCTAGAAGACAGTGGCAGGAGGTGACTGTCTTGTGGGTAAGGGTTT
GGGGTCCTTGATGAGTATCTCTCAATTGGCCTTAAATATAAGCAGGAAAA
GGAGTTTATGATGGATTCCAGGCTCAGCAGGGCTCAGGAGGGCTCAGGCA
GCCAGCAGAGGAAGTCAGAGCATCTTCTTTGGTTTAGCCCAAGTAATGAC
TTCCTTAAAAAGCTGAAGGAAAATCCAGAGTGACCAGATTATAAACTGTA
CTCTTGCATTTTCTCTCCCTCCTCTCACCCACAGCCTCTTGATGAACCGG
AGGAAGTTTCTTTACCAATTCAAAAATGTCCGCTGGGCTAAGGGTCGGCG
TGAGACCTACCTGTGCTACGTAGTGAAGAGGCGTGACAGTGCTACATCCT
TTTCACTGGACTTTGGTTATCTTCGCAATAAGGTATCAATTAAAGTCGGC
TTTGCAAGCAGTTTAATGGTCAACTGTGAGTGCTTTTAGAGCCACCTGCT
GATGGTATTACTTCCATCCTTTTTTGGCATTTGTGTCTCTATCACATTCC
TCAAATCCTTTTTTTTATTTCTTTTTCCATGTCCATGCACCCATATTAGA
CATGGCCCAAAATATGTGATTTAATTCCTCCCCAGTAATGCTGGGCACCC
TAATACCACTCCTTCCTTCAGTGCCAAGAACAACTGCTCCCAAACTGTTT
ACCAGCTTTCCTCAGCATCTGAATTGCCTTTGAGATTAATTAAGCTAAAA
GCATTTTTATATGGGAGAATATTATCAGCTTGTCCAAGCAAAAATTTTAA
ATGTGAAAAACAAATTGTGTCTTAAGCATTTTTGAAAATTAAGGAAGAAG
AATTTGGGAAAAAATTAACGGTGGCTCAATTCTGTCTTCCAAATGATTTC
TTTTCCCTCCTACTCACATGGGTCGTAGGCCAGTGAATACATTCAACATG
GTGATCCCCAGAAAACTCAGAGAAGCCTCGGCTGATGATTAATTAAATTG
ATCTTTCGGCTACCCGAGAGAATTACATTTCCAAGAGACTTCTTCACCAA
AATCCAGATGGGTTTACATAAACTTCTGCCCACGGGTATCTCCTCTCTCC
TAACACGCTGTGACGTCTGGGCTTGGTGGAATCTCAGGGAAGCATCCGTG
GGGTGGAAGGTCATCGTCTGGCTCGTTGTTTGATGGTTATATTACCATGC
AATTTTCTTTGCCTACATTTGTATTGAATACATCCCAATCTCCTTCCTAT
TCGGTGACATGACACATTCTATTTCAGAAGGCTTTGATTTTATCAAGCAC
TTTCATTTACTTCTCATGGCAGTGCCTATTACTTCTCTTACAATACCCAT
CTGTCTGCTTTACCAAAATCTATTTCCCCTTTTCAGATCCTCCCAAATGG
TCCTCATAAACTGTCCTGCCTCCACCTAGTGGTCCAGGTATATTTCCACA
ATGTTACATCAACAGGCACTTCTAGCCATTTTCCTTCTCAAAAGGTGCAA
AAAGCAACTTCATAAACACAAATTAAATCTTCGGTGAGGTAGTGTGATGC
TGCTTCCTCCCAACTCAGCGCACTTCGTCTTCCTCATTCCACAAAAACCC
ATAGCCTTCCTTCACTCTGCAGGACTAGTGCTGCCAAGGGTTCAGCTCTA
CCTACTGGTGTGCTCTTTTGAGCAAGTTGCTTAGCCTCTCTGTAACACAA
GGACAATAGCTGCAAGCATCCCCAAAGATCATTGCAGGAGACAATGACTA
AGGCTACCAGAGCCGCAATAAAAGTCAGTGAATTTTAGCGTGGTCCTCTC
TGTCTCTCCAGAACGGCTGCCACGTGGAATTGCTCTTCCTCCGCTACATC
TCGGACTGGGACCTAGACCCTGGCCGCTGCTACCGCGTCACCTGGTTCAC
CTCCTGGAGCCCCTGCTACGACTGTGCCCGACATGTGGCCGACTTTCTGC
GAGGGAACCCCAACCTCAGTCTGAGGATCTTCACCGCGCGCCTCTACTTC
TGTGAGGACCGCAAGGCTGAGCCCGAGGGGCTGCGGCGGCTGCACCGCGC
CGGGGTGCAAATAGCCATCATGACCTTCAAAGGTGCGAAAGGGCCTTCCG
CGCAGGCGCAGTGCAGCAGCCCGCATTCGGGATTGCGATGCGGAATGAAT
GAGTTAGTGGGGAAGCTCGAGGGGAAGAAGTGGGCGGGGATTCTGGTTCA
CCTCTGGAGCCGAAATTAAAGATTAGAAGCAGAGAAAAGAGTGAATGGCT
CAGAGACAAGGCCCCGAGGAAATGAGAAAATGGGGCCAGGGTTGCTTCTT
TCCCCTCGATTTGGAACCTGAACTGTCTTCTACCCCCATATCCCCGCCTT
TTTTTCCTTTTTTTTTTTTTGAAGATTATTTTTACTGCTGGAATACTTTT
GTAGAAAACCACGAAAGAACTTTCAAAGCCTGGGAAGGGCTGCATGAAAA
TTCAGTTCGTCTCTCCAGACAGCTTCGGCGCATCCTTTTGGTAAGGGGCT
TCCTCGCTTTTTAAATTTTCTTTCTTTCTCTACAGTCTTTTTTGGAGTTT
CGTATATTTCTTATATTTTCTTATTGTTCAATCACTCTCAGTTTTCATCT
GATGAAAACTTTATTTCTCCTCCACATCAGCTTTTTCTTCTGCTGTTTCA
CCATTCAGAGCCCTCTGCTAAGGTTCCTTTTCCCTCCCTTTTCTTTCTTT
TGTTGTTTCACATCTTTAAATTTCTGTCTCTCCCCAGGGTTGCGTTTCCT
TCCTGGTCAGAATTCTTTTCTCCTTTTTTTTTTTTTTTTTTTTTTTTTTT
AAACAAACAAACAAAAAACCCAAAAAAACTCTTTCCCAATTTACTTTCTT
CCAACATGTTACAAAGCCATCCACTCAGTTTAGAAGACTCTCCGGCCCCA
CCGACCCCCAACCTCGTTTTGAAGCCATTCACTCAATTTGCTTCTCTCTT
TCTCTACAGCCCCTGTATGAGGTTGATGACTTACGAGACGCATTTCGTAC
TTTGGGACTTTGATAGCAACTTCCAGGAATGTCACACACGATGAAATATC
TCTGCTGAAGACAGTGGATAAAAAACAGTCCTTCAAGTCTTCTCTGTTTT
TATTCTTCAACTCTCACTTTCTTAGAGTTTACAGAAAAAATATTTATATA
CGACTCTTTAAAAAGATCTATGTCTTGAAAATAGAGAAGGAACACAGGTC
TGGCCAGGGACGTGCTGCAATTGGTGCAGTTTTGAATGCAACATTGTCCC
CTACTGGGAATAACAGAACTGCAGGACCTGGGAGCATCCTAAAGTGTCAA
CGTTTTTCTATGACTTTTAGGTAGGATGAGAGCAGAAGGTAGATCCTAAA
AAGCATGGTGAGAGGATCAAATGTTTTTATATCAACATCCTTTATTATTT
GATTCATTTGAGTTAACAGTGGTGTTAGTGATAGATTTTTCTATTCTTTT
CCCTTGACGTTTACTTTCAAGTAACACAAACTCTTCCATCAGGCCATGAT
CTATAGGACCTCCTAATGAGAGTATCTGGGTGATTGTGACCCCAAACCAT
CTCTCCAAAGCATTAATATCCAATCATGCGCTGTATGTTTTAATCAGCAG
AAGCATGTTTTTATGTTTGTACAAAAGAAGATTGTTATGGGTGGGGATGG
AGGTATAGACCATGCATGGTCACCTTCAAGCTACTTTAATAAAGGATCTT
AAAATGGGCAGGAGGACTGTGAACAAGACACCCTAATAATGGGTTGATGT
CTGAAGTAGCAAATCTTCTGGAAACGCAAACTCTTTTAAGGAAGTCCCTA
ATTTAGAAACACCCACAAACTTCACATATCATAATTAGCAAACAATTGGA
AGGAAGTTGCTTGAATGTTGGGGAGAGGAAAATCTATTGGCTCTCGTGGG
TCTCTTCATCTCAGAAATGCCAATCAGGTCAAGGTTTGCTACATTTTGTA
TGTGTGTGATGCTTCTCCCAAAGGTATATTAACTATATAAGAGAGTTGTG
ACAAAACAGAATGATAAAGCTGCGAACCGTGGCACACGCTCATAGTTCTA
GCTGCTTGGGAGGTTGAGGAGGGAGGATGGCTTGAACACAGGTGTTCAAG
GCCAGCCTGGGCAACATAACAAGATCCTGTCTCTCAAAAAAAAAAAAAAA
AAAAAGAAAGAGAGAGGGCCGGGCGTGGTGGCTCACGCCTGTAATCCCAG
CACTTTGGGAGGCCGAGCCGGGCGGATCACCTGTGGTCAGGAGTTTGAGA
CCAGCCTGGCCAACATGGCAAAACCCCGTCTGTACTCAAAATGCAAAAAT
TAGCCAGGCGTGGTAGCAGGCACCTGTAATCCCAGCTACTTGGGAGGCTG
AGGCAGGAGAATCGCTTGAACCCAGGAGGTGGAGGTTGCAGTAAGCTGAG
ATCGTGCCGTTGCACTCCAGCCTGGGCGACAAGAGCAAGACTCTGTCTCA
GAAAAAAAAAAAAAAAAGAGAGAGAGAGAGAAAGAGAACAATATTTGGGA
GAGAAGGATGGGGAAGCATTGCAAGGAAATTGTGCTTTATCCAACAAAAT
GTAAGGAGCCAATAAGGGATCCCTATTTGTCTCTTTTGGTGTCTATTTGT
CCCTAACAACTGTCTTTGACAGTGAGAAAAATATTCAGAATAACCATATC
CCTGTGCCGTTATTACCTAGCAACCCTTGCAATGAAGATGAGCAGATCCA
CAGGAAAACTTGAATGCACAACTGTCTTATTTTAATCTTATTGTACATAA
GTTTGTAAAAGAGTTAAAAATTGTTACTTCATGTATTCATTTATATTTTA
TATTATTTTGCGTCTAATGATTTTTTATTAACATGATTTCCTTTTCTGAT
ATATTGAAATGGAGTCTCAAAGCTTCATAAATTTATAACTTTAGAAATGA
TTCTAATAACAACGTATGTAATTGTAACATTGCAGTAATGGTGCTACGAA
GCCATTTCTCTTGATTTTTAGTAAACTTTTATGACAGCAAATTTGCTTCT
GGCTCACTTTCAATCAGTTAAATAAATGATAAATAATTTTGGAAGCTGTG
AAGATAAAATACCAAATAAAATAATATAAAAGTGATTTATATGAAGTTAA
AATAAAAAATCAGTATGATGGAATAAACTTG

[0361] Apolipoprotein B mRNA editing enzyme, catalytic polypeptide-like (APOBEC) is a family of evolutionarily conserved cytidine deaminases. Members of this family are C-to-U editing enzymes. The N-terminal domain of APOBEC like proteins is the catalytic domain, while the C-terminal domain is a pseudocatalytic domain. More specifically, the catalytic domain is a zinc dependent cytidine deaminase domain and is important for cytidine deamination. APOBEC family members include APOBEC1, APOBEC2, APOBEC3A, APOBEC3B, APOBEC3C, APOBEC3D (“APOBEC3E” now refers to this), APOBEC3F, APOBEC3G, APOBEC3H, APOBEC4, and Activation-induced (cytidine) deaminase. Many modified cytidine deaminases are commercially available, including but not limited to SaBE3, SaKKH-BE3, VQR-BE3, EQR-BE3, VRER-BE3, YE1-BE3, EE-BE3, YE2-BE3, and YEE-BE3, which are available from Addgene (plasmids 85169, 85170, 85171, 85172, 85173, 85174, 85175, 85176, 85177).

[0362] Other exemplary deaminases that can be fused to Cas9 according to aspects of this disclosure are provided below. It should be understood that, in some embodiments, the active domain of the respective sequence can be used, e.g., the domain without a localizing signal (nuclear localization sequence, without nuclear export signal, cytoplasmic localizing signal).

Human AID:
[sequence omitted]
(underline: nuclear localization sequence; double underline:
nuclear export signal)
Mouse AID:
MDSLLMKQKKFLYHFKNVRWAKGRHETYLCYVVKRRDSATSCSLDFGHLRNKSGCHV
ELLFLRYISDWDLDPGRCYRVTWFTSWSPCYDCARHVAEFLRWNPNLSLRIFTARLYFC
EDRKAEPEGLRRLHRAGVQIGIMTFKDYFYCWNTFVENRERTFKAWEGLHENSVRLTR
QLRRILLPLYEVDDLRDAFRMLGF
(underline: nuclear localization sequence; double underline:
nuclear export signal)
Canine AID:
MDSLLMKQRKFLYHFKNVRWAKGRHETYLCYVVKRRDSATSFSLDFGHLRNKSGCHV
ELLFLRYISDWDLDPGRCYRVTWFTSWSPCYDCARHVADFLRGYPNLSLRIFAARLYFC
EDRKAEPEGLRRLHRAGVQIAIMTFKDYFYCWNTFVENREKTFKAWEGLHENSVRLSR
QLRRILLPLYEVDDLRDAFRTLGL
(underline: nuclear localization sequence; double underline:
nuclear export signal)
Bovine AID:
MDSLLKKQRQFLYQFKNVRWAKGRHETYLCYVVKRRDSPTSFSLDFGHLRNKAGCHV
ELLFLRYISDWDLDPGRCYRVTWFTSWSPCYDCARHVADFLRGYPNLSLRIFTARLYFC
DKERKAEPEGLRRLHRAGVQIAIMTFKDYFYCWNTFVENHERTFKAWEGLHENSVRLS
RQLRRILLPLYEVDDLRDAFRTLGL
(underline: nuclear localization sequence; double underline:
nuclear export signal)
Rat AID
MAVGSKPKAALVGPHWERERIWCFLCSTGLGTQQTGQTSRWLRPAATQDPVSPPRSLL
MKQRKFLYHFKNVRWAKGRHETYLCYVVKRRDSATSFSLDFGYLRNKSGCHVELLFL
RYISDWDLDPGRCYRVTWFTSWSPCYDCARHVADFLRGNPNLSLRIFTARLTGWGALP
AGLMSPARPSDYFYCWNTFVENHERTFKAWEGLHENSVRLSRRLRRILLPLYEVDDLR
DAFRTLGL
(underline: nuclear localization sequence; double underline:
nuclear export signal)
Mouse APOBEC-3
MGPFCLGCSHRKCYSPIRNLISQETFKFHFKNLGYAKGRKDTFLCYEVTRKDCDSPVSLH
HGVFKNKDNIHAEICFLYWFHDKVLKVLSPREEFKITWYMSWSPCFECAEQIVRFLATHHN
LSLDIFSSRLYNVQDPETQQNLCRLVQEGAQVAAMDLYEFKKCWKKFVDNGGRRFRP
WKRLLTNFRYQDSKLQEILRPCYIPVPSSSS STLSNICLTKGLPETRFCVEGRRMDPLSEE
EFYSQFYNQRVKHLCYYHRMKPYLCYQLEQFNGQAPLKGCLLSEKGKQHAEILFLDKIR
SMELSQVTITCYLTWSPCPNCAWQLAAFKRDRPDLILHIYTSRLYFHWKRPFQKGLCSLW
QSGILVDVMDLPQFTDCWTNFVNPKRPFWPWKGLEIISRRTQRRLRRIKESWGLQDLVN
DFGNLQLGPPMS
(italic: nucleic acid editing domain)
Rat APOBEC-3:
MGPFCLGCSHRKCYSPIRNLISQETFKFHFKNRLRYAIDRKDTFLCYEVTRKDCDSPVSL
HHGVFKNKDNIHAEICFLYWFHDKVLKVLSPREEFKITWYMSWSPCFECAEQVLRFLATHH
NLSLDIFSSRLYNIRDPENQQNLCRLVQEGAQVAAMDLYEFKKCWKKFVDNGGRRFRP
WKKLLTNFRYQDSKLQEILRPCYIPVPSSSSSTLSNICLTKGLPETRFCVERRRVHLLSEEE
FYSQFYNQRVKHLCYYHGVKPYLCYQLEQFNGQAPLKGCLLSEKGKQHAEILFLDKIRS
MELSQVIITCYLTWSPCPNCAWQLAAFKRDRPDLILHIYTSRLYFHWKRPFQKGLCSLWQ
SGILVDVMDLPQFTDCWTNFVNPKRPFWPWKGLEIISRRTQRRLHRIKESWGLQDLVND
FGNLQLGPPMS
(italic: nucleic acid editing domain)
Rhesus macaque APOBEC-3 G:
MVEPMDPRTFVSNFNNRPILSGLNTVWLCCEVKTKDPSGPPLDAKIFQGKVYSKAKYHP
EMRFLRWFHKWRQLHHDQEYKVTWYVSWSPCTRCANSVATFLAKDPKVTLTIFVARL
YYFWKPDYQQALRILCQKRGGPHATMKIMNYNEFQDCWNKFVDGRGKPFKPRNNLPK
HYTLLQATLGELLRHLMDPGTFTSNFNNKPWVSGQHETYLCYKVERLHNDTWVPLNQ
HRGFLRNQAPNIHGFPKGRHAELCFLDLIPFWKLDGQQYRVTCFTSWSPCFSCAQEMAK
FISNNEHVSLCIFAARIYDDQGRYQEGLRALHRDGAKIAMMNYSEFEYCWDTFVDRQG
RPFQPWDGLDEHSQALSGRLRAI
(italic: nucleic acid editing domain; underline: cytoplasmic
localization signal)
Chimpanzee APOBEC-3 G:
MKPHFRNPVERMYQDTFSDNFYNRPILSHRNTVWLCYEVKTKGPSRPPLDAKIFRGQVY
SKLKYHPEMRFFHWFSKWRKLHRDQEYEVTWYISWSPCTKCTRDVATFLAEDPKVTLTIF
VARLYYFWDPDYQEALRSLCQKRDGPRATMKIMNYDEFQHCWSKFVYSQRELFEPWN
NLPKYYILLHIMLGEILRHSMDPPTFTSNFNNELWVRGRHETYLCYEVERLHNDTWVLL
NQRRGFLCNQAPHKHGFLEGRHAELCFLDVIPFWKLDLHQDYRVTCFTSWSPCFSCAQEM
AKFISNNKHVSLCIFAARIYDDQGRCQEGLRTLAKAGAKISIMTYSEFKHCWDTFVDHQ
GCPFQPWDGLEEHSQALSGRLRAILQNQGN
(italic: nucleic acid editing domain; underline: cytoplasmic
localization signal)
Green monkey APOBEC-3G:
MNPQIRNMVEQMEPDIFVYYFNNRPILSGRNTVWLCYEVKTKDPSGPPLDANIFQGKLY
PEAKDHPEMKFLHWFRKWRQLHRDQEYEVTWYVSWSPCTRCANSVATFLAEDPKVTLTIF
VARLYYFWKPDYQQALRILCQERGGPHATMKIMNYNEFQHCWNEFVDGQGKPFKPRK
NLPKHYTLLHATLGELLRHVMDPGTFTSNFNNKPWVSGQRETYLCYKVERSHNDTWV
LLNQHRGFLRNQAPDRHGFPKGRHAELCFLDLIPFWKLDDQQYRVTCFTSWSPCFSCAQK
MAKFISNNKHVSLCIFAARIYDDQGRCQEGLRTLHRDGAKIAVMNYSEFEYCWDTFVD
RQGRPFQPWDGLDEHSQALSGRLRAI
(italic: nucleic acid editing domain; underline: cytoplasmic
localization signal)
Human APOBEC-3G:
MKPHFRNTVERMYRDTFSYNFYNRPILSRRNTVWLCYEVKTKGPSRPPLDAKIFRGQVY
ESELKYHPEMRFFHWFSKWRKLHRDQEYEVTWYISWSPCTKCTRDMATFLAEDPKVTLTIF
VARLYYFWDPDYQEALRSLCQKRDGPRATMKIMNYDEFQHCWSKFVYSQRELFEPWN
NLPKYYILLHIMLGEILRHSMDPPTFTFNFNNEPWVRGRHETYLCYEVERMHNDTWVLL
NQRRGFLCNQAPHKHGFLEGRHAELCFLDVIPFWKLDLDQDYRVTCFTSWSPCFSCAQEM
AKFISKNKHVSLCIFTARIYDDQGRCQEGLRTLAEAGAKISIMTYSEFKHCWDTFVDHQ
GCPFQPWDGLDEHSQDLSGRLRAILQNQEN
(italic: nucleic acid editing domain; underline: cytoplasmic
localization signal)
Human APOBEC-3F:
MKPHFRNTVERMYRDTFSYNFYNRPILSRRNTVWLCYEVKTKGPSRPRLDAKIFRGQV
YSQPEHHAEMCFLSWFCGNQLPAYKCFQITWFVSWTPCPDCVAKLAEFLAEHPNVTLTIS
AARLYYYWERDYRRALCRLSQAGARVKIMDDEEFAYCWENFVYSEGQPFMPWYKFD
DNYAFLHRTLKEILRNPMEAMYPHIFYFHFKNLRKAYGRNESWLCFTMEVVKHHSPVS
WKRGVFRNQVDPETHCHAERCFLSWFCDDILSPNTNYEVTWYTSWSPCPECAGEVAEFLA
RHSNVNLTIFTARLYYFWDTDYQEGLRSLSQEGASVEIMGYKDFKYCWENFVYNDDEP
FKPWKGLKYNFLFLDSKLQEILE
(italic: nucleic acid editing domain)
Human APOBEC-3B:
MNPQIRNPMERMYRDTFYDNFENEPILYGRSYTWLCYEVKIKRGRSNLLWDTGVFRGQ
VYFKPQYHAEMCFLSWFCGNQLPAYKCFQITWFVSWTPCPDCVAKLAEFLSEHPNVTLTI
SAARLYYYWERDYRRALCRLSQAGARVTIMDYEEFAYCWENFVYNEGQQFMPWYKF
DENYAFLHRTLKEILRYLMDPDTFTFNFNNDPLVLRRRQTYLCYEVERLDNGTWVLMD
QHMGFLCNEAKNLLCGFYGRHAELRFLDLVPSLQLDPAQIYRVTWFISWSPCFSWGCAGE
VRAFLQENTHVRLRIFAARIYDYDPLYKEALQMLRDAGAQVSIMTYDEFEYCWDTFVY
RQGCPFQPWDGLEEHSQALSGRLRAILQNQGN
(italic: nucleic acid editing domain)
Rat APOBEC-3B:
MQPQGLGPNAGMGPVCLGCSHRRPYSPIRNPLKKLYQQTFYFHFKNVRYAWGRKNNF
LCYEVNGMDCALPVPLRQGVFRKQGHIHAELCFIYWFHDKVLRVLSPMEEFKVTWYM
SWSPCSKCAEQVARFLAAHRNLSLAIFSSRLYYYLRNPNYQQKLCRLIQEGVHVAAMD
LPEFKKCWNKFVDNDGQPFRPWMRLRINFSFYDCKLQEIFSRMNLLREDVFYLQFNNSH
RVKPVQNRYYRRKSYLCYQLERANGQEPLKGYLLYKKGEQHVEILFLEKMRSMELSQV
RITCYLTWSPCPNCARQLAAFKKDHPDLILRIYTSRLYFWRKKFQKGLCTLWRSGIHVD
VMDLPQFADCWTNFVNPQRPFRPWNELEKNSWRIQRRLRRIKESWGL
Bovine APOBEC-3B:
DGWEVAFRSGTVLKAGVLGVSMTEGWAGSGHPGQGACVWTPGTRNTMNLLREVLFK
QQFGNQPRVPAPYYRRKTYLCYQLKQRNDLTLDRGCFRNKKQRHAERFIDKINSLDLNP
SQSYKIICYITWSPCPNCANELVNFITRNNHLKLEIFASRLYFHWIKSFKMGLQDLQNAGI
SVAVMTHTEFEDCWEQFVDNQSRPFQPWDKLEQYSASIRRRLQRILTAPI
Chimpanzee APOBEC-3B:
MNPQIRNPMEWMYQRTFYYNFENEPILYGRSYTWLCYEVKIRRGHSNLLWDTGVFRGQ
MYSQPEHHAEMCFLSWFCGNQLSAYKCFQITWFVSWTPCPDCVAKLAKFLAEHPNVTL
TISAARLYYYWERDYRRALCRLSQAGARVKIMDDEEFAYCWENFVYNEGQPFMPWYK
FDDNYAFLHRTLKEIIRHLMDPDTFTFNFNNDPLVLRRHQTYLCYEVERLDNGTWVLM
DQHMGFLCNEAKNLLCGFYGRHAELRFLDLVPSLQLDPAQIYRVTWFISWSPCFSWGC
AGQVRAFLQENTHVRLRIFAARIYDYDPLYKEALQMLRDAGAQVSIMTYDEFEYCWDT
FVYRQGCPFQPWDGLEEHSQALSGRLRAILQVRASSLCMVPHRPPPPPQSPGPCLPLCSE
PPLGSLLPTGRPAPSLPFLLTASFSFPPPASLPPLPSLSLSPGHLPVPSFHSLTSCSIQPPCSSR
IRETEGWASVSKEGRDLG
Human APOBEC-3C:
MNPQIRNPMKAMYPGTFYFQFKNLWEANDRNETWLCFTVEGIKRRSVVSWKTGVFRN
QVDSETHCHAERCFLSWFCDDILSPNTKYQVTWYTSWSPCPDCAGEVAEFLARHSNVNLTI
FTARLYYFQYPCYQEGLRSLSQEGVAVEIMDYEDFKYCWENFVYNDNEPFKPWKGLKT
NFRLLKRRLRESLQ
(italic: nucleic acid editing domain)
Gorilla APOBEC3C
MNPQIRNPMKAMYPGTFYFQFKNLWEANDRNETWLCFTVEGIKRRSVVSWKTGVFRN
QVDSETHCHAERCFLSWECDDILSPNTNYQVTWYTSWSPCPECAGEVAEFLARHSNVNLTI
FTARLYYFQDTDYQEGLRSLSQEGVAVKIMDYKDFKYCWENFVYNDDEPFKPWKGLK
YNFRFLKRRLQEILE
(italic: nucleic acid editing domain)
Human APOBEC-3A:
MEASPASGPRHLMDPHIFTSNFNNGIGRHKTYLCYEVERLDNGTSVKMDQHRGFLHNQ
AKNLLCGFYGRHAELRFLDLVPSLQLDPAQIYRVTWFISWSPCFSWGCAGEVRAFLQENTH
VRLRIFAARIYDYDPLYKEALQMLRDAGAQVSIMTYDEFKHCWDTFVDHQGCPFQPWD
GLDEHSQALSGRLRAILQNQGN
(italic: nucleic acid editing domain)
Rhesus macaque APOBEC-3A:
MDGSPASRPRHLMDPNTFTFNFNNDLSVRGRHQTYLCYEVERLDNGTWVPMDERRGF
LCNKAKNVPCGDYGCHVELRFLCEVPSWQLDPAQTYRVTWFISWSPCFRRGCAGQVRVFL
QENKHVRLRIFAARIYDYDPLYQEALRTLRDAGAQVSIMTYEEFKHCWDTFVDRQGRP
FQPWDGLDEHSQALSGRLRAILQNQGN
(italic: nucleic acid editing domain)
Bovine APOBEC-3A:
MDEYTFTENFNNQGWPSKTYLCYEMERLDGDATIPLDEYKGFVRNKGLDQPEKPCHAE
LYFLGKIHSWNLDRNQHYRLTCFISWSPCYDCAQKLTTFLKENHHISLHILASRIYTHNRFG
CHQSGLCELQAAGARITIMTFEDFKHCWETFVDHKGKPFQPWEGLNVKSQALCTELQAI
LKTQQN
(italic: nucleic acid editing domain)
Human APOBEC-3H:
MALLTAETFRLQFNNKRRLRRPYYPRKALLCYQLTPQNGSTPTRGYFENKKKCHAEICFI
NEIKSMGLDETQCYQVTCYLTWSPCSSCAWELVDFIKAHDHLNLGIFASRLYYHWCKPQQ
KGLRLLCGSQVPVEVMGFPKFADCWENFVDHEKPLSFNPYKMLEELDKNSRAIKRRLE
RIKIPGVRAQGRYMDILCDAEV
(italic: nucleic acid editing domain)
Rhesus macaque APOBEC-3H:
MALLTAKTFSLQFNNKRRVNKPYYPRKALLCYQLTPQNGSTPTRGHLKNKKKDHAEIR
FINKIKSMGLDETQCYQVTCYLTWSPCPSCAGELVDFIKAHRHLNLRIFASRLYYHWRP
NYQEGLLLLCGSQVPVEVMGLPEFTDCWENFVDHKEPPSFNPSEKLEELDKNSQAIKRR
LERIKSRSVDVLENGLRSLQLGPVTPSSSIRNSR
Human APOBEC-3D:
MNPQIRNPMERMYRDTFYDNFENEPILYGRSYTWLCYEVKIKRGRSNLLWDTGVFRGP
VLPKRQSNHRQEVYFRFENHAEMCFLSWFCGNRLPANRRFQITWFVSWNPCLPCVVKVT
KFLAEHPNVTLTISAARLYYYRDRDWRWVLLRLHKAGARVKIMDYEDFAYCWENFVC
NEGQPFMPWYKFDDNYASLHRTLKEILRNPMEAMYPHIFYFHFKNLLKACGRNESWLC
FTMEVTKHHSAVFRKRGVFRNQVDPETHCHAERCFLSWPCDDILSPNTNYEVTWYTSWSP
CPECAGEVAEFLARHSNVNLTIFTARLCYFWDTDYQEGLCSLSQEGASVKIMGYKDFVS
CWKNFVYSDDEPFKPWKGLQTNFRLLKRRLREILQ
(italic: nucleic acid editing domain)
Human APOBEC-1:
MTSEKGPSTGDPTLRRRIEPWEFDVFYDPRELRKEACLLYEIKWGMSRKIWRSSGKNTT
NHVEVNFIKKFTSERDFHPSMSCSITWFLSWSPCWECSQAIREFLSRHPGVTLVIYVARLF
WHMDQQNRQGLRDLVNSGVTIQIMRASEYYHCWRNFVNYPPGDEAHWPQYPPLWMM
LYALELHCIILSLPPCLKISRRWQNHLTFFRLHLQNCHYQTIPPHILLATGLIHPSVAWR
Mouse APOBEC-1:
MSSETGPVAVDPTLRRRIEPHEFEVFFDPRELRKETCLLYEINWGGRHSVWRHTSQNTSN
HVEVNFLEKFTTERYFRPNTRCSITWFLSWSPCGECSRAITEFLSRHPYVTLFIYIARLYH
HTDQRNRQGLRDLISSGVTIQIMTEQEYCYCWRNFVNYPPSNEAYWPRYPHLWVKLYV
LELYCIILGLPPCLKILRRKQPQLTFFTITLQTCHYQRIPPHLLWATGLK
Rat APOBEC-1:
[sequence omitted]
Human APOBEC-2:
MAQKEEAAVATEAASQNGEDLENLDDPEKLKELIELPPFEIVTGERLPANFFKFQFRNVE
YSSGRNKTFLCYVVEAQGKGGQVQASRGYLEDEHAAAHAEEAFFNTILPAFDPALRYN
VTWYVSSSPCAACADRIIKTLSKTKNLRLLILVGRLFMWEEPEIQAALKKLKEAGCKLRI
[sequence omitted]
Mouse APOBEC-2:
MAQKEEAAEAAAPASQNGDDLENLEDPEKLKELIDLPPFEIVTGVRLPVNFFKFQFRNV
EYSSGRNKTFLCYVVEVQSKGGQAQATQGYLEDEHAGAHAEEAFFNTILPAFDPALKY
NVTWYVSSSPCAACADRILKTLSKTKNLRLLILVSRLFMWEEPEVQAALKKLKEAGCKL
RIMKPQDFEYIWQNFVEQEEGESKAFEPWEDIQENFLYYEEKLADILK
Rat APOBEC-2:
MAQKEEAAEAAAPASQNGDDLENLEDPEKLKELIDLPPFEIVTGVRLPVNFFKFQFRNV
EYSSGRNKTFLCYVVEAQSKGGQVQATQGYLEDEHAGAHAEEAFFNTILPAFDPALKY
NVTWYVSSSPCAACADRILKTLSKTKNLRLLILVSRLFMWEEPEVQAALKKLKEAGCKL
RIMKPQDFEYLWQNFVEQEEGESKAFEPWEDIQENFLYYEEKLADILK
Bovine APOBEC-2:
MAQKEEAAAAAEPASQNGEEVENLEDPEKLKELIELPPFEIVTGERLPAHYFKFQFRNVE
YSSGRNKTFLCYVVEAQSKGGQVQASRGYLEDEHATNHAEEAFFNSIMPTFDPALRYM
VTWYVSSSPCAACADRIVKTLNKTKNLRLLILVGRLFMWEEPEIQAALRKLKEAGCRLR
IMKPQDFEYIWQNFVEQEEGESKAFEPWEDIQENFLYYEEKLADILK
Petromyzon marinus CDA1 (pmCDA1)
MTDAEYVRIHEKLDIYTFKKQFFNNKKSVSHRCYVLFELKRRGERRACFWGYAVNKPQ
SGTERGIHAEIFSIRKVEEYLRDNPGQFTINWYSSWSPCADCAEKILEWYNQELRGNGHT
LKIWACKLYYEKNARNQIGLWNLRDNGVGLNVMVSEHYQCCRKIFIQSSHNQLNENR
WLEKTLKRAEKRRSELSFMIQVKILHTTKSPAV
Human APOBEC3G D316R D317R
MKPHFRNTVERMYRDTFSYNFYNRPILSRRNTVWLCYEVKTKGPSRPPLDAKIFRGQVY
SELKYHPEMRFFHWFSKWRKLHRDQEYEVTWYISWSPCTKCTRDMATFLAEDPKVTLT
IFVARLYYFWDPDYQEALRSLCQKRDGPRATMKFNYDEFQHCWSKFVYSQRELFEPWN
NLPKYYILLHFMLGEILRHSMDPPTFTFNFNNEPWVRGRHETYLCYEVERMHNDTWVL
LNQRRGFLCNQAPHKHGFLEGRHAELCFLDVIPFWKLDLDQDYRVTC
FTSWSPCFSCAQEMAKFISKKHVSLCIFTARIYRRQGRCQEGLRTLAEAGAKISFTYSEFK
HCWDTFVDHQGCPFQPWDGLDEHSQDLSGRLRAILQNQEN
Human APOBEC3G chain A
MDPPTFTFNFNNEPWWGRHETYLCYEVERMHNDTWVLLNQRRGFLCNQAPHKHGFLE
GRHAELCFLDVIPFWKLDLDQDYRVTCFTSWSPCFSCAQEMAKFISKNKHVSLCIFTARI
YDDQGRCQEGLRTLAEAGAKISFTYSEFKHCWDTFVDHQGCPFQPWDGLD
EHSQDLSGRLRAILQ
Human APOBEC3G chain A D120R D121R
MDPPTFTFNFNNEPWVRGRHETYLCYEVERMHNDTWVLLNQRRGFLCNQAPHKHGFL
EGRHAELCFLDVIPFWKLDLDQDYRVTCFTSWSPCFSCAQEMAKFISKNKHVSLCIFTAR
IYRRQGRCQEGLRTLAEAGAKISFMTYSEFKHCWDTFVDHQGCPFQPWDGLDEHSQDL
SGRLRAILQ

[0363] The term “deaminase” or “deaminase domain” refers to a protein or fragment thereof that catalyzes a deamination reaction. In some embodiments, the deaminase or deaminase domain is a variant of a naturally-occurring deaminase from an organism. In some embodiments, the deaminase or deaminase domain does not occur in nature. For example, in some embodiments, the deaminase or deaminase domain is at least 50%, at least 55%, at least 60%, at least 65%, at least 70%, at least 75% at least 80%, at least 85%, at least 90%, at least 95%, at least 96%, at least 97%, at least 98%, at least 99%, or at least 99.5% identical to a naturally-occurring deaminase. In some embodiments, the deaminase is a cytosine deaminase or an adenosine deaminase.

[0364] “Detect” refers to identifying the presence, absence or amount of the analyte to be detected.

[0365] By “detectable label” is meant a composition that when linked to a molecule of interest renders the latter detectable, via spectroscopic, photochemical, biochemical, immunochemical, or chemical means. For example, useful labels include radioactive isotopes, magnetic beads, metallic beads, colloidal particles, fluorescent dyes, electron-dense reagents, enzymes (for example, as commonly used in an ELISA), biotin, digoxigenin, or haptens.

[0366] By “disease” is meant any condition or disorder that damages or interferes with the normal function of a cell, tissue, or organ. In one embodiment, the disease is a neoplasia or cancer (e.g., multiple myeloma).

[0367] The term “effective amount,” as used herein, refers to an amount of a biologically active agent that is sufficient to elicit a desired biological response. In some embodiments, an effective amount of a fusion protein provided herein, e.g., of a cytidine deaminase or an adenosine deaminase nucleobase editor comprising a nCas9 domain and one or more deaminase domains (e.g., cytidine deaminase, adenosine deaminase) may refer to the amount of the fusion protein that is sufficient to induce editing of a target site specifically bound and edited by the cytidine deaminase or adenosine deaminase nucleobase editors. As will be appreciated by the skilled artisan, the effective amount of an agent, e.g., a fusion protein, may vary depending on various factors as, for example, on the desired biological response, e.g., on the specific allele, genome, or target site to be edited, on the cell or tissue being targeted, and on the agent being used. In the context of a CAR-T cell, “an effective amount refers” to the quantity of cells necessary to administer to a patient to achieve a therapeutic response.

[0368] In some embodiments, an effective amount of a fusion protein provided herein, e.g., of a fusion protein comprising a nCas9 domain and a cytidine deaminase or adenosine deaminase may refer to the amount of the fusion protein that is sufficient to induce editing of a target site specifically bound and edited by the fusion protein. As will be appreciated by the skilled artisan, the effective amount of an agent, e.g., a fusion protein, a nuclease, a cytidine deaminase or adenosine deaminase, a hybrid protein, a protein dimer, a complex of a protein (or protein dimer) and a polynucleotide, or a polynucleotide, may vary depending on various factors as, for example, on the desired biological response, e.g., on the specific allele, genome, or target site to be edited, on the cell or tissue being targeted, and on the agent being used.

[0369] “Epitope,” as used herein, means an antigenic determinant. An epitope is the part of an antigen molecule that by its structure determines the specific antibody molecule that will recognize and bind it.

[0370] By “fragment” is meant a portion of a polypeptide or nucleic acid molecule. This portion contains, at least about 10%, 20%, 30%, 40%, 50%, 60%, 70%, 80%, or 90% of the entire length of the reference nucleic acid molecule or polypeptide. A fragment may contain 10, 20, 30, 40, 50, 60, 70, 80, 90, or 100, 200, 300, 400, 500, 600, 700, 800, 900, or 1000 nucleotides or amino acids.

[0371] “Graft versus host disease” (GVHD) refers to a pathological condition where transplanted cells of a donor generate an immune response against cells of the host.

[0372] “Host versus graft disease” (HVGD) refers to a pathological condition where the immune system of a host generates an immune response against transplanted cells of a donor.

[0373] “Hybridization” means hydrogen bonding, which may be Watson-Crick, Hoogsteen or reversed Hoogsteen hydrogen bonding, between complementary nucleobases. For example, adenine and thymine are complementary nucleobases that pair through the formation of hydrogen bonds.

[0374] By “immune cell” is meant a cell of the immune system capable of generating an immune response.

[0375] By “immune effector cell” is meant a lymphocyte, once activated, capable of effecting an immune response upon a target cell. A T cell is an exemplary immune effector cell.

[0376] By “immune response regulation gene” or “immune response regulator” is meant a gene that encodes a polypeptide that is involved in regulation of a immune response. An immune response regulation gene may regulate immune response in multiple mechanisms or on different levels. For example, an immune response regulation gene may inhibit or facilitate the activation of an immune cell, e.g. a T cell. An immune response regulation gene may increase or decrease the activation threshold of a immune cell. In some embodiments, the immune response regulation gene positively regulates an immune cell signal transduction pathway. In some embodiments, the immune response regulation gene negatively regulates an immune cell signal transduction pathway. In some embodiments, the immune response regulation gene encodes an antigen, an antibody, a cytokine, or a neuroendocrine. In some embodiments, the immune response regulation gene encodes a Cblb protein.

[0377] By “immunogenic gene” is meant a gene that encodes a polypeptide that is able to elicit an immune response. For example, an immunogenic gene may encode an immunogen that elicits an immune response. In some embodiments, an immunogenic gene encodes a cell surface protein. In some embodiments, an immunogenic gene encodes a cell surface antigen or a cell surface marker. In some embodiments, the cell surface marker is a T cell marker or a B cell marker. In some embodiments, an immunogenic gene encodes a CD2, CD3e, CD3 delta, CD3 gamma, TRAC, TRBC1, TRBC2, CD4, CD5, CD7, CD8, CD19, CD23, CD27, CD28, CD30, CD33, CD52, CD70, CD127, CD122, CD130, CD132, CD38, CD69, CD11a, CD58, CD99, CD103, CCR4, CCR5, CCR6, CCR9, CCR10, CXCR3, CXCR4, CLA, CD161, B2M, or CIITA polypeptide.

[0378] The term “inhibitor of base repair” or “IBR” refers to a protein that is capable in inhibiting the activity of a nucleic acid repair enzyme, for example a base excision repair enzyme. In some embodiments, the IBR is an inhibitor of inosine base excision repair. Exemplary inhibitors of base repair include inhibitors of APE1, Endo III, Endo IV, Endo V, Endo VIII, Fpg, hOGG1, hNEIL1, T7 Endo1, T4PDG, UDG, hSMUG1, and hAAG. In some embodiments, the IBR is an inhibitor of Endo V or hAAG. In some embodiments, the IBR is a catalytically inactive EndoV or a catalytically inactive hAAG.

[0379] The terms “isolated,” “purified,” or “biologically pure” refer to material that is free to varying degrees from components which normally accompany it as found in its native state. “Isolate” denotes a degree of separation from original source or surroundings. “Purify” denotes a degree of separation that is higher than isolation. A “purified” or “biologically pure” protein is sufficiently free of other materials such that any impurities do not materially affect the biological properties of the protein or cause other adverse consequences. That is, a nucleic acid or peptide of this invention is purified if it is substantially free of cellular material, viral material, or culture medium when produced by recombinant DNA techniques, or chemical precursors or other chemicals when chemically synthesized. Purity and homogeneity are typically determined using analytical chemistry techniques, for example, polyacrylamide gel electrophoresis or high-performance liquid chromatography. The term “purified” can denote that a nucleic acid or protein gives rise to essentially one band in an electrophoretic gel. For a protein that can be subjected to modifications, for example, phosphorylation or glycosylation, different modifications may give rise to different isolated proteins, which can be separately purified.

[0380] By “isolated polynucleotide” is meant a nucleic acid (e.g., a DNA) that is free of the genes which, in the naturally-occurring genome of the organism from which the nucleic acid molecule of the invention is derived, flank the gene. The term therefore includes, for example, a recombinant DNA that is incorporated into a vector; into an autonomously replicating plasmid or virus; or into the genomic DNA of a prokaryote or eukaryote; or that exists as a separate molecule (for example, a cDNA or a genomic or cDNA fragment produced by PCR or restriction endonuclease digestion) independent of other sequences. In addition, the term includes an RNA molecule that is transcribed from a DNA molecule, as well as a recombinant DNA that is part of a hybrid gene encoding additional polypeptide sequence.

[0381] By an “isolated polypeptide” is meant a polypeptide of the invention that has been separated from components that naturally accompany it. Typically, the polypeptide is isolated when it is at least 60%, by weight, free from the proteins and naturally-occurring organic molecules with which it is naturally associated. Preferably, the preparation is at least 75%, more preferably at least 90%, and most preferably at least 99%, by weight, a polypeptide of the invention. An isolated polypeptide of the invention may be obtained, for example, by extraction from a natural source, by expression of a recombinant nucleic acid encoding such a polypeptide; or by chemically synthesizing the protein. Purity can be measured by any appropriate method, for example, column chromatography, polyacrylamide gel electrophoresis, or by HPLC analysis.

[0382] The term “linker,” as used herein, refers to a bond (e.g., covalent bond), chemical group, or a molecule linking two molecules or moieties, e.g., two domains of a fusion protein, such as, for example, a nuclease-inactive Cas9 domain and a nucleic acid-editing domain (e.g., a cytidine deaminase, adenosine deaminase) or in the context of a chimeric antigen receptor, a linker linking a variable heavy (VH) region to a constant heavy (CH) region. In some embodiments, the linker joins two domains of a fusion protein, such as, for example, a nuclease-inactive Cas9 domain and a nucleic acid-editing domain (e.g., a cytidine deaminase, adenosine deaminase). In some embodiments, a linker joins a gRNA binding domain of an RNA-programmable nuclease, including a Cas9 nuclease domain, and the catalytic domain of a nucleic-acid editing protein. In some embodiments, a linker joins a dCas9 and a nucleic-acid editing protein. Typically, the linker is positioned between, or flanked by, two groups, molecules, or other moieties and connected to each one via a covalent bond, thus connecting the two. In some embodiments, the linker is an amino acid or a plurality of amino acids (e.g., a peptide or protein). In some embodiments, the linker is an organic molecule, group, polymer, or chemical moiety. In some embodiments, the linker is 5-100 amino acids in length, for example, 5, 6, 7, 8, 9, 10, 11, 12, 13, 14, 15, 16, 17, 18, 19, 20, 25, 35, 45, 50, 55, 60, 60, 65, 70, 70, 75, 80, 85, 90, 90, 95, 100, 101, 102, 103, 104, 105, 110, 120, 130, 140, 150, 160, 175, 180, 190, or 200 amino acids in length. Longer or shorter linkers are also contemplated. In some embodiments, a linker comprises the amino acid sequence SGSETPGTSESATPES, which may also be referred to as the XTEN linker. In some embodiments, a linker comprises the amino acid sequence SGGS. In some embodiments, a linker comprises (SGGS)ₙ, (GGGS)ₙ, (GGGGS)ₙ, (G)ₙ, (EAAAK)ₙ, (GGS)ₙ, SGSETPGTSESATPES, or (XP)ₙ motif, or a combination of any of these, wherein n is independently an integer between 1 and 30, and wherein X is any amino acid. In some embodiments, n is 1, 2, 3, 4, 5, 6, 7, 8, 9, 10, 11, 12, 13, 14, or 15.

[0383] In some embodiments, the chimeric antigen receptor comprises at least one linker. The at least one linker joins, or links, a variable heavy (VH) region to a constant heavy (CH) region of the extracellular binding domain of the chimeric antigen receptor. Linkers can also link a variable light (VL) region to a variable constant (VC) region of the extracellular binding domain.

[0384] In some embodiments, the domains of the cytidine deaminase or adenosine deaminase nucleobase editor are fused via a linker that comprises the amino acid sequence of SGGSSGSETPGTSESATPESSGGS, SGGSSGGSSGSETPGTSESATPESSGGSSGGS, or GGSGGSPGSPAGSPTSTEEGTSESATPESGPGTSTEPSEGSAPGSPAGSPTSTEEGTSTE PSEGSAPGTSTEPSEGSAPGTSESATPESGPGSEPATSGGSGGS. In some embodiments, domains of the cytidine deaminase or adenosine deaminase nucleobase editor are fused via a linker comprising the amino acid sequence SGSETPGTSESATPES, which may also be referred to as the XTEN linker. In some embodiments, the linker is 24 amino acids in length. In some embodiments, the linker comprises the amino acid sequence SGGSSGGSSGSETPGTSESATPES. In some embodiments, the linker is 40 amino acids in length. In some embodiments, the linker comprises the amino acid sequence SGGSSGGSSGSETPGTSESATPESSGGSSGGSSGGSSGGS. In some embodiments, the linker is 64 amino acids in length. In some embodiments, the linker comprises the amino acid sequence SGGSSGGSSGSETPGTSESATPESSGGSSGGSSGGSSGGSSGSETPGTSESATPESSGGS SGGS. In some embodiments, the linker is 92 amino acids in length. In some embodiments, the linker comprises the amino acid sequence PGSPAGSPTSTEEGTSESATPESGPGTSTEPSEGSAPGSPAGSPTSTEEGTSTEPSEGSAP GTSTEPSEGSAPGTSESATPESGPGSEPATS.

[0385] By “marker” is meant any protein or polynucleotide having an alteration in expression level or activity that is associated with a disease or disorder.

[0386] The term “mutation,” as used herein, refers to a substitution of a residue within a sequence, e.g., a nucleic acid or amino acid sequence, with another residue, or a deletion or insertion of one or more residues within a sequence. Mutations are typically described herein by identifying the original residue followed by the position of the residue within the sequence and by the identity of the newly substituted residue. Various methods for making the amino acid substitutions (mutations) provided herein are well known in the art, and are provided by, for example, Green and Sambrook, Molecular Cloning: A Laboratory Manual (4^{th} ed., Cold Spring Harbor Laboratory Press, Cold Spring Harbor, N.Y. (2012)).

[0387] “Neoplasia” refers to cells or tissues exhibiting abnormal growth or proliferation. The term neoplasia encompasses cancer and solid tumors.

[0388] By “nuclear factor of activated T cells 1 (NFATc1) polypeptide” is meant a protein having at least about 85% amino acid sequence identity to NCBI Accession No. NM_172390.2 or a fragment thereof and is a component of the activated T cell DNA-binding transcription complex. An exemplary amino acid sequence is provided below.

[0389] >NP_765978.1 nuclear factor of activated T-cells, cytoplasmic 1 isoform A [Homo sapiens]

MPSTSFPVPSKFPLGPAAAVFGRGETLGPAPRAGGTMKSAEEEHYGYASS
NVSPALPLPTAHSTLPAPCHNLQTSTPGIIPPADHPSGYGAALDGGPAGY
FLSSGHTRPDGAPALESPRIEITSCLGLYHNNNQFFHDVEVEDVLPSSKR
SPSTATLSLPSLEAYRDPSCLSPASSLSSRSCNSEASSYESNYSYPYASP
QTSPWQSPCVSPKTTDPEEGFPRGLGACTLLGSPRHSPSTSPRASVTEES
WLGARSSRPASPCNKRKYSLNGRQPPYSPHHSPTPSPHGSPRVSVTDDSW
LGNTTQYTSSAIVAAINALTTDSSLDLGDGVPVKSRKTTLEQPPSVALKV
EPVGEDLGSPPPPADFAPEDYSSFQHIRKGGFCDQYLAVPQHPYQWAKPK
PLSPTSYMSPTLPALDWQLPSHSGPYELRIEVQPKSHHRAHYETEGSRGA
VKASAGGHPIVQLHGYLENEPLMLQLFIGTADDRLLRPHAFYQVHRITGK
TVSTTSHEAILSNTKVLEIPLLPENSMRAVIDCAGILKLRNSDIELRKGE
TDIGRKNTRVRLVFRVHVPQPSGRTLSLQVASNPIECSQRSAQELPLVEK
QSTDSYPVVGGKKMVLSGHNFLQDSKVIFVEKAPDGHHVWEMEAKTDRDL
CKPNSLVVEIPPFRNQRITSPVHVSFYVCNGKRKRSQYQRFTYLPANGNA
IFLTVSREHERVGCFF

[0390] By “nuclear factor of activated T cells 1 (NFATc1) polynucleotide” is meant a nucleic acid molecule encoding a NFATc1 polypeptide. The NFATc1 gene encodes a protein that is involved in in the inducible expression of cytokine genes, especially IL-2 and IL-4, in T-cells. An exemplary nucleic acid sequenced is provided below.

[0391] >NM_172390.2 Homo sapiens nuclear factor of activated T cells 1 (NFATC1), transcript variant 1, mRNA

GGCGGGCGCTCGGCGACTCGTCCCCGGGGCCCCGCGCGGGCCCGGGCAGC
AGGGGCGTGATGTCACGGCAGGGAGGGGGCGCGGGAGCCGCCGGGCCGGC
GGGGAGGCGGGGGAGGTGTTTTCCAGCTTTAAAAAGGCAGGAGGCAGAGC
GCGGCCCTGCGTCAGAGCGAGACTCAGAGGCTCCGAACTCGCCGGCGGAG
TCGCCGCGCCAGATCCCAGCAGCAGGGCGCGGGCACCGGGGCGCGGGCAG
GGCTCGGAGCCACCGCGCAGGTCCTAGGGCCGCGGCCGGGCCCCGCCACG
CGCGCACACGCCCCTCGATGACTTTCCTCCGGGGCGCGCGGCGCTGAGCC
CGGGGCGAGGGCTGTCTTCCCGGAGACCCGACCCCGGCAGCGCGGGGCGG
CCGCTTCTCCTGTGCCTCCGCCCGCCGCTCCACTCCCCGCCGCCGCCGCG
CGGATGCCAAGCACCAGCTTTCCAGTCCCTTCCAAGTTTCCACTTGGCCC
TGCGGCTGCGGTCTTCGGGAGAGGAGAAACTTTGGGGCCCGCGCCGCGCG
CCGGCGGCACCATGAAGTCAGCGGAGGAAGAACACTATGGCTATGCATCC
TCCAACGTCAGCCCCGCCCTGCCGCTCCCCACGGCGCACTCCACCCTGCC
GGCCCCGTGCCACAACCTTCAGACCTCCACACCGGGCATCATCCCGCCGG
CGGATCACCCCTCGGGGTACGGAGCAGCTTTGGACGGTGGGCCCGCGGGC
TACTTCCTCTCCTCCGGCCACACCAGGCCTGATGGGGCCCCTGCCCTGGA
GAGTCCTCGCATCGAGATAACCTCGTGCTTGGGCCTGTACCACAACAATA
ACCAGTTTTTCCACGATGTGGAGGTGGAAGACGTCCTCCCTAGCTCCAAA
CGGTCCCCCTCCACGGCCACGCTGAGTCTGCCCAGCCTGGAGGCCTACAG
AGACCCCTCGTGCCTGAGCCCGGCCAGCAGCCTGTCCTCCCGGAGCTGCA
ACTCAGAGGCCTCCTCCTACGAGTCCAACTACTCGTACCCGTACGCGTCC
CCCCAGACGTCGCCATGGCAGTCTCCCTGCGTGTCTCCCAAGACCACGGA
CCCCGAGGAGGGCTTTCCCCGCGGGCTGGGGGCCTGCACACTGCTGGGTT
CCCCGCGGCACTCCCCCTCCACCTCGCCCCGCGCCAGCGTCACTGAGGAG
AGCTGGCTGGGTGCCCGCTCCTCCAGACCCGCGTCCCCTTGCAACAAGAG
GAAGTACAGCCTCAACGGCCGGCAGCCGCCCTACTCACCCCACCACTCGC
CCACGCCGTCCCCGCACGGCTCCCCGCGGGTCAGCGTGACCGACGACTCG
TGGTTGGGCAACACCACCCAGTACACCAGCTCGGCCATCGTGGCCGCCAT
CAACGCGCTGACCACCGACAGCAGCCTGGACCTGGGAGATGGCGTCCCTG
TCAAGTCCCGCAAGACCACCCTGGAGCAGCCGCCCTCAGTGGCGCTCAAG
GTGGAGCCCGTCGGGGAGGACCTGGGCAGCCCCCCGCCCCCGGCCGACTT
CGCGCCCGAAGACTACTCCTCTTTCCAGCACATCAGGAAGGGCGGCTTCT
GCGACCAGTACCTGGCGGTGCCGCAGCACCCCTACCAGTGGGCGAAGCCC
AAGCCCCTGTCCCCTACGTCCTACATGAGCCCGACCCTGCCCGCCCTGGA
CTGGCAGCTGCCGTCCCACTCAGGCCCGTATGAGCTTCGGATTGAGGTGC
AGCCCAAGTCCCACCACCGAGCCCACTACGAGACGGAGGGCAGCCGGGGG
GCCGTGAAGGCGTCGGCCGGAGGACACCCCATCGTGCAGCTGCATGGCTA
CTTGGAGAATGAGCCGCTGATGCTGCAGCTTTTCATTGGGACGGCGGACG
ACCGCCTGCTGCGCCCGCACGCCTTCTACCAGGTGCACCGCATCACAGGG
AAGACCGTGTCCACCACCAGCCACGAGGCCATCCTCTCCAACACCAAAGT
CCTGGAGATCCCACTCCTGCCGGAGAACAGCATGCGAGCCGTCATTGACT
GTGCCGGAATCCTGAAACTCAGAAACTCCGACATTGAACTTCGGAAAGGA
GAGACGGACATCGGGAGGAAGAACACACGGGTACGGCTGGTGTTCCGCGT
TCACGTCCCGCAACCCAGCGGCCGCACGCTGTCCCTGCAGGTGGCCTCCA
ACCCCATCGAATGCTCCCAGCGCTCAGCTCAGGAGCTGCCTCTGGTGGAG
AAGCAGAGCACGGACAGCTATCCGGTCGTGGGCGGGAAGAAGATGGTCCT
GTCTGGCCACAACTTCCTGCAGGACTCCAAGGTCATTTTCGTGGAGAAAG
CCCCAGATGGCCACCATGTCTGGGAGATGGAAGCGAAAACTGACCGGGAC
CTGTGCAAGCCGAATTCTCTGGTGGTTGAGATCCCGCCATTTCGGAATCA
GAGGATAACCAGCCCCGTTCACGTCAGTTTCTACGTCTGCAACGGGAAGA
GAAAGCGAAGCCAGTACCAGCGTTTCACCTACCTTCCCGCCAACGGTAAC
GCCATCTTTCTAACCGTAAGCCGTGAACATGAGCGCGTGGGGTGCTTTTT
CTAAAGACGCAGAAACGACGTCGCCGTAAAGCAGCGTGGCGTGTTGCACA
TTTAACTGTGTGATGTCCCGTTAGTGAGACCGAGCCATCGATGCCCTGAA
AAGGAAAGGAAAAGGGAAGCTTCGGATGCATTTTCCTTGATCCCTGTTGG
GGGTGGGGGGCGGGGGTTGCATACTCAGATAGTCACGGTTATTTTGCTTC
TTGCGAATGTATAACAGCCAAGGGGAAAACATGGCTCTTCTGCTCCAAAA
AACTGAGGGGGTCCTGGTGTGCATTTGCACCCTAAAGCTGCTTACGGTGA
AAAGGCAAATAGGTATAGCTATTTTGCAGGCACCTTTAGGAATAAACTTT
GCTTTTAAGCCTGTAAAAAAAAAAAAAA

[0392] The term “nuclear localization sequence,” “nuclear localization signal,” or “NLS” refers to an amino acid sequence that promotes import of a protein into the cell nucleus. Nuclear localization sequences are known in the art and described, for example, in Plank et al., International PCT application, PCT/EP2000/011690, filed Nov. 23, 2000, published as WO/2001/038547 on May 31, 2001, the contents of which are incorporated herein by reference for their disclosure of exemplary nuclear localization sequences. In other embodiments, the NLS is an optimized NLS described, for example, by Koblan et al., Nature Biotech. 2018 doi:10.1038/nbt.4172. Optimized sequences useful in the methods of the invention are shown at FIGS. 8A-8E and 9. In some embodiments, an NLS comprises the amino acid sequence PKKKRKVEGADKRTADGSEFES PKKKRKV, KRTADGSEFESPKKKRKV, KRPAATKKAGQAKKKK, KKTELQTTNAENKTKKL, KRGINDRNFWRGENGRKTR, RKSGKIAAIVVKRPRK, PKKKRKV, or MDSLLMNRRKFLYQFKNVRWAKGRRETYLC.

[0393] The terms “nucleic acid” and “nucleic acid molecule,” as used herein, refer to a compound comprising a nucleobase and an acidic moiety, e.g., a nucleoside, a nucleotide, or a polymer of nucleotides. Typically, polymeric nucleic acids, e.g., nucleic acid molecules comprising three or more nucleotides are linear molecules, in which adjacent nucleotides are linked to each other via a phosphodiester linkage. In some embodiments, “nucleic acid” refers to individual nucleic acid residues (e.g. nucleotides and/or nucleosides). In some embodiments, “nucleic acid” refers to an oligonucleotide chain comprising three or more individual nucleotide residues. As used herein, the terms “oligonucleotide” and “polynucleotide” can be used interchangeably to refer to a polymer of nucleotides (e.g., a string of at least three nucleotides). In some embodiments, “nucleic acid” encompasses RNA as well as single and/or double-stranded DNA. Nucleic acids may be naturally occurring, for example, in the context of a genome, a transcript, an mRNA, tRNA, rRNA, siRNA, snRNA, a plasmid, cosmid, chromosome, chromatid, or other naturally occurring nucleic acid molecule. On the other hand, a nucleic acid molecule may be a non-naturally occurring molecule, e.g., a recombinant DNA or RNA, an artificial chromosome, an engineered genome, or fragment thereof, or a synthetic DNA, RNA, DNA/RNA hybrid, or including non-naturally occurring nucleotides or nucleosides. Furthermore, the terms “nucleic acid,” “DNA,” “RNA,” and/or similar terms include nucleic acid analogs, e.g., analogs having other than a phosphodiester backbone. Nucleic acids can be purified from natural sources, produced using recombinant expression systems and optionally purified, chemically synthesized, etc. Where appropriate, e.g., in the case of chemically synthesized molecules, nucleic acids can comprise nucleoside analogs such as analogs having chemically modified bases or sugars, and backbone modifications. A nucleic acid sequence is presented in the 5′ to 3′ direction unless otherwise indicated. In some embodiments, a nucleic acid is or comprises natural nucleosides (e.g. adenosine, thymidine, guanosine, cytidine, uridine, deoxyadenosine, deoxythymidine, deoxyguanosine, and deoxycytidine); nucleoside analogs (e.g., 2-aminoadenosine, 2-thiothymidine, inosine, pyrrolo-pyrimidine, 3-methyl adenosine, 5-methylcytidine, 2-aminoadenosine, C5-bromouridine, C5-fluorouridine, C5-iodouridine, C5-propynyl-uridine, C5-propynyl-cytidine, C5-methylcytidine, 2-aminoadenosine, 7-deazaadenosine, 7-deazaguanosine, 8-oxoadenosine, 8-oxoguanosine, 0(6)-methylguanine, and 2-thiocytidine); chemically modified bases; biologically modified bases (e.g., methylated bases); intercalated bases; modified sugars (., 2′- e.g., fluororibose, ribose, 2′-deoxyribose, arabinose, and hexose); and/or modified phosphate groups (e.g., phosphorothioates and 5′-N-phosphoramidite linkages).

[0394] The term “nucleic acid programmable DNA binding protein” or “napDNAbp” refers to a protein that associates with a nucleic acid (e.g., DNA or RNA), such as a guide nucleic acid, that guides the napDNAbp to a specific nucleic acid sequence. For example, a Cas9 protein can associate with a guide RNA that guides the Cas9 protein to a specific DNA sequence that has complementary to the guide RNA. In some embodiments, the napDNAbp, the napDNAbp is a Cas9 domain, for example a nuclease active Cas9, a Cas9 nickase (nCas9), or a nuclease inactive Cas9 (dCas9). Examples of nucleic acid programmable DNA binding proteins include, without limitation, Cas9 (e.g., dCas9 and nCas9), CasX, CasY, Cpf1, Cas12b/C2c1, and Cas12c/C2c3. Other nucleic acid programmable DNA binding proteins are also within the scope of this disclosure, though they may not be specifically listed in this disclosure.

[0395] As used herein, “obtaining” as in “obtaining an agent” includes synthesizing, purchasing, or otherwise acquiring the agent.

[0396] By “Programmed cell death 1 (PDCD1 or PD-1) polypeptide” is meant a protein having at least about 85% amino acid sequence identity to NCBI Accession No. AJS10360.1 or a fragment thereof. The PD-1 protein is thought to be involved in T cell function regulation during immune reactions and in tolerance conditions. An exemplary B2M polypeptide sequence is provided below.

[0397] >AJS10360.1 programmed cell death 1 protein [Homo sapiens]

MQIPQAPWPVVWAVLQLGWRPGWFLDSPDRPWNPPTFSPALLVVTEGDNA
TFTCSFSNTSESFVLNWYRMSPSNQTDKLAAFPEDRSQPGQDCRFRVTQL
PNGRDFHMSVVRARRNDSGTYLCGAISLAPKAQIKESLRAELRVTERRAE
VPTAHPSPSPRPAGQFQTLVVGVVGGLLGSLVLLVWVLAVICSRAARGTI
GARRTGQPLKEDPSAVPVFSVDYGELDFQWREKTPEPPVPCVPEQTEYAT
IVFPSGMGTSSPARRGSADGPRSAQPLRPEDGHCSWPL

[0398] By “Programmed cell death 1 (PDCD1 or PD-1) polynucleotide” is meant a nucleic acid molecule encoding a PD-1 polypeptide. The PDCD1 gene encodes an inhibitory cell surface receptor that inhibits T-cell effector functions in an antigen-specific manner. An exemplary PDCD1 nucleic acid sequence is provided below.

[0399] AY238517.1 Homo sapiens programmed cell death 1 (PDCD1) mRNA, complete cds

ATGCAGATCCCACAGGCGCCCTGGCCAGTCGTCTGGGCGGTGCTACAACT
GGGCTGGCGGCCAGGATGGTTCTTAGACTCCCCAGACAGGCCCTGGAACC
CCCCCACCTTCTCCCCAGCCCTGCTCGTGGTGACCGAAGGGGACAACGCC
ACCTTCACCTGCAGCTTCTCCAACACATCGGAGAGCTTCGTGCTAAACTG
GTACCGCATGAGCCCCAGCAACCAGACGGACAAGCTGGCCGCCTTCCCCG
AGGACCGCAGCCAGCCCGGCCAGGACTGCCGCTTCCGTGTCACACAACTG
CCCAACGGGCGTGACTTCCACATGAGCGTGGTCAGGGCCCGGCGCAATGA
CAGCGGCACCTACCTCTGTGGGGCCATCTCCCTGGCCCCCAAGGCGCAGA
TCAAAGAGAGCCTGCGGGCAGAGCTCAGGGTGACAGAGAGAAGGGCAGAA
GTGCCCACAGCCCACCCCAGCCCCTCACCCAGGCCAGCCGGCCAGTTCCA
AACCCTGGTGGTTGGTGTCGTGGGCGGCCTGCTGGGCAGCCTGGTGCTGC
TAGTCTGGGTCCTGGCCGTCATCTGCTCCCGGGCCGCACGAGGGACAATA
GGAGCCAGGCGCACCGGCCAGCCCCTGAAGGAGGACCCCTCAGCCGTGCC
TGTGTTCTCTGTGGACTATGGGGAGCTGGATTTCCAGTGGCGAGAGAAGA
CCCCGGAGCCCCCCGTGCCCTGTGTCCCTGAGCAGACGGAGTATGCCACC
ATTGTCTTTCCTAGCGGAATGGGCACCTCATCCCCCGCCCGCAGGGGCTC
AGCTGACGGCCCTCGGAGTGCCCAGCCACTGAGGCCTGAGGATGGACACT
GCTCTTGGCCCCTCTGA

[0400] The term “recombinant” as used herein in the context of proteins or nucleic acids refers to proteins or nucleic acids that do not occur in nature, but are the product of human engineering. For example, in some embodiments, a recombinant protein or nucleic acid molecule comprises an amino acid or nucleotide sequence that comprises at least one, at least two, at least three, at least four, at least five, at least six, or at least seven mutations as compared to any naturally occurring sequence.

[0401] By “reduces” or “increases” is meant a negative or positive alteration, respectively, of at least 10%, 25%, 50%, 75%, or 100%.

[0402] By “reference” is meant a standard or control condition.

[0403] A “reference sequence” is a defined sequence used as a basis for sequence comparison. A reference sequence may be a subset of or the entirety of a specified sequence; for example, a segment of a full-length cDNA or gene sequence, or the complete cDNA or gene sequence. For polypeptides, the length of the reference polypeptide sequence will generally be at least about 16 amino acids, at least about 20 amino acids, more at least about 25 amino acids, and even more preferably about 35 amino acids, about 50 amino acids, or about 100 amino acids. For nucleic acids, the length of the reference nucleic acid sequence will generally be at least about 50 nucleotides, at least about 60 nucleotides, at least about 75 nucleotides, and about 100 nucleotides or about 300 nucleotides or any integer thereabout or therebetween.

[0404] The term “RNA-programmable nuclease,” and “RNA-guided nuclease” are used with (e.g., binds or associates with) one or more RNA(s) that is not a target for cleavage. In some embodiments, an RNA-programmable nuclease, when in a complex with an RNA, may be referred to as a nuclease:RNA complex. Typically, the bound RNA(s) is referred to as a guide RNA (gRNA). gRNAs can exist as a complex of two or more RNAs, or as a single RNA molecule. gRNAs that exist as a single RNA molecule may be referred to as single-guide RNAs (sgRNAs), though “gRNA” is used interchangeably to refer to guide RNAs that exist as either single molecules or as a complex of two or more molecules. Typically, gRNAs that exist as single RNA species comprise two domains: (1) a domain that shares homology to a target nucleic acid (e.g., and directs binding of a Cas9 complex to the target); and (2) a domain that binds a Cas9 protein. In some embodiments, domain (2) corresponds to a sequence known as a tracrRNA, and comprises a stem-loop structure. For example, in some embodiments, domain (2) is identical or homologous to a tracrRNA as provided in Jinek et ah, Science 337:816-821(2012), the entire contents of which is incorporated herein by reference. Other examples of gRNAs (e.g., those including domain 2) can be found in U.S. Provisional Patent Application No. 61/874,682, filed Sep. 6, 2013, entitled “Switchable Cas9 Nucleases and Uses Thereof,” and U.S. Provisional Patent Application, No. 61/874,746, filed Sep. 6, 2013, entitled “Delivery System For Functional Nucleases,” the entire contents of each are hereby incorporated by reference in their entirety. In some embodiments, a gRNA comprises two or more of domains (1) and (2), and may be referred to as an “extended gRNA.” For example, an extended gRNA will, e.g., bind two or more Cas9 proteins and bind a target nucleic acid at two or more distinct regions, as described herein. The gRNA comprises a nucleotide sequence that complements a target site, which mediates binding of the nuclease/RNA complex to said target site, providing the sequence specificity of the nuclease:RNA complex. In some embodiments, the RNA-programmable nuclease is the (CRIS PR-associated system) Cas9 endonuclease, for example, Cas9 (Csn1) from Streptococcus pyogenes (see, e.g., “Complete genome sequence of an Ml strain of Streptococcus pyogenes.” Ferretti J. J., McShan W. M., Ajdic D. J., Savic D. J., Savic G., Lyon K., Primeaux C, Sezate S., Suvorov A. N., Kenton S., Lai H. S., Lin S. P., Qian Y., Jia H. G., Najar F. Z., Ren Q., Zhu H., Song L., White J., Yuan X., Clifton S. W., Roe B. A., McLaughlin R. E., Proc. Natl. Acad. Sci. U.S.A. 98:4658-4663(2001); “CRISPR RNA maturation by trans-encoded small RNA and host factor RNase III.” Deltcheva E., Chylinski K., Sharma C M., Gonzales K., Chao Y., Pirzada Z. A., Eckert M. R., Vogel J., Charpentier E., Nature 471:602-607(2011).

[0405] By “specifically binds” is meant a nucleic acid molecule, polypeptide, or complex thereof (e.g., a nucleic acid programmable DNA binding protein, a guide nucleic acid, and a chimeric antigen receptor), but which does not substantially recognize and bind other molecules in a sample, for example, a biological sample. For example, a chimeric antigen receptor specifically binds to a particular marker expressed on the surface of a cell, but does not bind to other polypeptides, carbohydrates, lipids, or any other compound on the surface of the cell.

[0406] Nucleic acid molecules useful in the methods of the invention include any nucleic acid molecule that encodes a polypeptide of the invention or a fragment thereof. Such nucleic acid molecules need not be 100% identical with an endogenous nucleic acid sequence, but will typically exhibit substantial identity. Polynucleotides having “substantial identity” to an endogenous sequence are typically capable of hybridizing with at least one strand of a double-stranded nucleic acid molecule. Nucleic acid molecules useful in the methods of the invention include any nucleic acid molecule that encodes a polypeptide of the invention or a fragment thereof. Such nucleic acid molecules need not be 100% identical with an endogenous nucleic acid sequence, but will typically exhibit substantial identity. Polynucleotides having “substantial identity” to an endogenous sequence are typically capable of hybridizing with at least one strand of a double-stranded nucleic acid molecule. By “hybridize” is meant pair to form a double-stranded molecule between complementary polynucleotide sequences (e.g., a gene described herein), or portions thereof, under various conditions of stringency. (See, e.g., Wahl, G. M. and S. L. Berger (1987) Methods Enzymol. 152:399; Kimmel, A. R. (1987) Methods Enzymol. 152:507).

[0407] For example, stringent salt concentration will ordinarily be less than about 750 mM NaCl and 75 mM trisodium citrate, preferably less than about 500 mM NaCl and 50 mM trisodium citrate, and more preferably less than about 250 mM NaCl and 25 mM trisodium citrate. Low stringency hybridization can be obtained in the absence of organic solvent, e.g., formamide, while high stringency hybridization can be obtained in the presence of at least about 35% formamide, and more preferably at least about 50% formamide. Stringent temperature conditions will ordinarily include temperatures of at least about 30° C., more preferably of at least about 37° C., and most preferably of at least about 42° C. Varying additional parameters, such as hybridization time, the concentration of detergent, e.g., sodium dodecyl sulfate (SDS), and the inclusion or exclusion of carrier DNA, are well known to those skilled in the art. Various levels of stringency are accomplished by combining these various conditions as needed. In a one: embodiment, hybridization will occur at 30° C. in 750 mM NaCl, 75 mM trisodium citrate, and 1% SDS. In another embodiment, hybridization will occur at 37° C. in 500 mM NaCl, 50 mM trisodium citrate, 1% SDS, 35% formamide, and 100 μg/ml denatured salmon sperm DNA (ssDNA). In another embodiment, hybridization will occur at 42° C. in 250 mM NaCl, 25 mM trisodium citrate, 1% SDS, 50% formamide, and 200 μg/ml ssDNA. Useful variations on these conditions will be apparent to those skilled in the art.

[0408] For most applications, washing steps that follow hybridization will also vary in stringency. Wash stringency conditions can be defined by salt concentration and by temperature. As above, wash stringency can be increased by decreasing salt concentration or by increasing temperature. For example, stringent salt concentration for the wash steps will preferably be less than about 30 mM NaCl and 3 mM trisodium citrate, and most preferably less than about 15 mM NaCl and 1.5 mM trisodium citrate. Stringent temperature conditions for the wash steps will ordinarily include a temperature of at least about 25° C., more preferably of at least about 42° C., and even more preferably of at least about 68° C. In an embodiment, wash steps will occur at 25° C. in 30 mM NaCl, 3 mM trisodium citrate, and 0.1% SDS. In a more preferred embodiment, wash steps will occur at 42 C in 15 mM NaCl, 1.5 mM trisodium citrate, and 0.1% SDS. In a more preferred embodiment, wash steps will occur at 68° C. in 15 mM NaCl, 1.5 mM trisodium citrate, and 0.1% SDS. Additional variations on these conditions will be apparent to those skilled in the art. Hybridization techniques are well known to those skilled in the art and are described, for example, in Benton and Davis (Science 196:180, 1977); Grunstein and Hogness (Proc. Natl. Acad. Sci., USA 72:3961, 1975); Ausubel et al. (Current Protocols in Molecular Biology, Wiley Interscience, New York, 2001); Berger and Kimmel (Guide to Molecular Cloning Techniques, 1987, Academic Press, New York); and Sambrook et al., Molecular Cloning: A Laboratory Manual, Cold Spring Harbor Laboratory Press, New York.

[0409] By “subject” is meant a mammal, including, but not limited to, a human or non-human mammal, such as a bovine, equine, canine, ovine, or feline. Subjects include livestock, domesticated animals raised to produce labor and to provide commodities, such as food, including without limitation, cattle, goats, chickens, horses, pigs, rabbits, and sheep.

[0410] By “substantially identical” is meant a polypeptide or nucleic acid molecule exhibiting at least 50% identity to a reference amino acid sequence (for example, any one of the amino acid sequences described herein) or nucleic acid sequence (for example, any one of the nucleic acid sequences described herein). In one embodiment, such a sequence is at least 60%, 80% or 85%, 90%, 95% or even 99% identical at the amino acid level or nucleic acid to the sequence used for comparison.

[0411] Sequence identity is typically measured using sequence analysis software (for example, Sequence Analysis Software Package of the Genetics Computer Group, University of Wisconsin Biotechnology Center, 1710 University Avenue, Madison, Wis. 53705, BLAST, BESTFIT, GAP, or PILEUP/PRETTYBOX programs). Such software matches identical or similar sequences by assigning degrees of homology to various substitutions, deletions, and/or other modifications. Conservative substitutions typically include substitutions within the following groups: glycine, alanine; valine, isoleucine, leucine; aspartic acid, glutamic acid, asparagine, glutamine; serine, threonine; lysine, arginine; and phenylalanine, tyrosine. In an exemplary approach to determining the degree of identity, a BLAST program may be used, with a probability score between e⁻³ and e⁻¹⁰⁰ indicating a closely related sequence.

[0412] Because RNA-programmable nucleases (e.g., Cas9) use RNA:DNA hybridization to target DNA cleavage sites, these proteins can be targeted, in principle, to any sequence specified by the guide RNA. Methods of using RNA-programmable nucleases, such as Cas9, for site-specific cleavage (e.g., to modify a genome) are known in the art (see e.g., Cong, L. et ah, Multiplex genome engineering using CRISPR/Cas systems. Science 339, 819-823 (2013); Mali, P. et ah, RNA-guided human genome engineering via Cas9. Science 339, 823-826 (2013); Hwang, W. Y. et ah, Efficient genome editing in zebrafish using a CRISPR-Cas system. Nature biotechnology 31, 227-229 (2013); Jinek, M. et ah, RNA-programmed genome editing in human cells. eLife 2, e00471 (2013); Dicarlo, J. E. et ah, Genome engineering in Saccharomyces cerevisiae using CRISPR-Cas systems. Nucleic acids research (2013); Jiang, W. et ah RNA-guided editing of bacterial genomes using CRISPR-Cas systems. Nature biotechnology 31, 233-239 (2013); the entire contents of each of which are incorporated herein by reference).

[0413] By “tet methylcytosine dioxygenase 2 (TET2) polypeptide” is meant a protein having at least about 85% amino acid sequence identity to NCBI Accession No. FM992369.1 or a fragment thereof and having catalytic activity to convert methylcytosine to 5-hydroxymethylcytosine. Defects in the gene have been associated with myeloproliferative disorders, and the enzyme's ability to methylate cytosine contributes to transcriptional regulation. An exemplary TET2 amino acid sequence is provided below.

>CAX30492.1 tet oncogene family member 2 [Homo sapiens]

MEQDRTNHVEGNRLSPFLIPSPPICQTEPLATKLQNGSPLPERAHPEVNG
DTKWHSFKSYYGIPCMKGSQNSRVSPDFTQESRGYSKCLQNGGIKRTVSE
PSLSGLLQIKKLKQDQKANGERRNFGVSQERNPGESSQPNVSDLSDKKES
VSSVAQENAVKDFTSFSTHNCSGPENPELQILNEQEGKSANYHDKNIVLL
KNKAVLMPNGATVSASSVEHTHGELLEKTLSQYYPDCVSIAVQKTTSHIN
AINSQATNELSCEITHPSHTSGQINSAQTSNSELPPKPAAVVSEACDADD
ADNASKLAAMLNTCSFQKPEQLQQQKSVFEICPSPAENNIQGTTKLASGE
EFCSGSSSNLQAPGGSSERYLKQNEMNGAYFKQSSVFTKDSFSATTTPPP
PSQLLLSPPPPLPQVPQLPSEGKSTLNGGVLEEHHHYPNQSNTTLLREVK
IEGKPEAPPSQSPNPSTHVCSPSPMLSERPQNNCVNRNDIQTAGTMTVPL
CSEKTRPMSEHLKHNPPIFGSSGELQDNCQQLMRNKEQEILKGRDKEQTR
DLVPPTQHYLKPGWIELKAPRFHQAESHLKRNEASLPSILQYQPNLSNQM
TSKQYTGNSNMPGGLPRQAYTQKTTQLEHKSQMYQVEMNQGQSQGTVDQH
LQFQKPSHQVHFSKTDHLPKAHVQSLCGTRFHFQQRADSQTEKLMSPVLK
QHLNQQASETEPFSNSHLLQHKPHKQAAQTQPSQSSHLPQNQQQQQKLQI
KNKEEILQTFPHPQSNNDQQREGSFFGQTKVEECFHGENQYSKSSEFETH
NVQMGLEEVQNINRRNSPYSQTMKSSACKIQVSCSNNTHLVSENKEQTTH
PELFAGNKTQNLHHMQYFPNNVIPKQDLLHRCFQEQEQKSQQASVLQGYK
NRNQDMSGQQAAQLAQQRYLIHNHANVFPVPDQGGSHTQTPPQKDTQKHA
ALRWHLLQKQEQQQTQQPQTESCHSQMHRPIKVEPGCKPHACMHTAPPEN
KTWKKVTKQENPPASCDNVQQKSIIETMEQHLKQFHAKSLFDHKALTLKS
QKQVKVEMSGPVTVLTRQTTAAELDSHTPALEQQTTSSEKTPTKRTAASV
LNNFIESPSKLLDTPIKNLLDTPVKTQYDFPSCRCVEQIIEKDEGPFYTH
LGAGPNVAAIREIMEERFGQKGKAIRIERVIYTGKEGKSSQGCPIAKWVV
RRSSSEEKLLCLVRERAGHTCEAAVIVILILVWEGIPLSLADKLYSELTE
TLRKYGTLTNRRCALNEERTCACQGLDPETCGASFSFGCSWSMYYNGCKF
ARSKIPRKFKLLGDDPKEEEKLESHLQNLSTLMAPTYKKLAPDAYNNQIE
YEHRAPECRLGLKEGRPFSGVTACLDFCAHAHRDLHNMQNGSTLVCTLTR
EDNREFGGKPEDEQLHVLPLYKVSDVDEFGSVEAQEEKKRSGAIQVLSSF
RRKVRMLAEPVKTCRQRKLEAKKAAAEKLSSLENSSNKNEKEKSAPSRTK
QTENASQAKQLAELLRLSGPVMQQSQQPQPLQKQPPQPQQQQRPQQQQPH
HPQTESVNSYSASGSTNPYMRRPNPVSPYPNSSHTSDIYGSTSPMNFYST
SSQAAGSYLNSSNPMNPYPGLLNQNTQYPSYQCNGNLSVDNCSPYLGSYS
PQSQPMDLYRYPSQDPLSKLSLPPIHTLYQPRFGNSQSFTSKYLGYGNQN
MQGDGFSSCTIRPNVHHVGKLPPYPTHEMDGHFMGATSRLPPNLSNPNMD
YKNGEHHSPSHIIHNYSAAPGMFNSSLHALHLQNKENDMLSHTANGLSKM
LPALNHDRTACVQGGLHKLSDANGQEKQPLALVQGVASGAEDNDEVWSDS
EQSFLDPDIGGVAVAPTHGSILIECAKRELHATTPLKNPNRNHPTRISLV
FYQHKSMNEPKHGLALWEAKMAEKAREKEEECEKYGPDYVPQKSHGKKVK
REPAEPHETSEPTYLRFIKSLAERTMSVTTDSTVTTSPYAFTRVTGPYNR
YI

[0414] By “tet methylcytosine dioxygenase 2 (TET2) polynucleotide” is meant a nucleic acid molecule encoding a TET2 polypeptide. The TETs polypeptide encodes a methylcytosine dioxygenase and has transcription regulatory activity. An exemplary TET2 nucleic acid is presented below.

>FM992369.1 Homo sapiens mRNA for tet oncogene family member 2 (TET2 gene)

CCGTGCCATCCCAACCTCCCACCTCGCCCCCAACCTTCGCGCTTGCTCTGCTTCTTCT
CCCAGGGGTGGAGACCCGCCGAGGTCCCCGGGGTTCCCGAGGGCTGCACCCTTCCC
CGCGCTCGCCAGCCCTGGCCCCTACTCCGCGCTGGTCCGGGCGCACCACTCCCCCCG
CGCCACTGCACGGCGTGAGGGCAGCCCAGGTCTCCACTGCGCGCCCCGCTGTACGG
CCCCAGGTGCCGCCGGCCTTTGTGCTGGACGCCCGGTGCGGGGGGCTAATTCCCTGG
GAGCCGGGGCTGAGGGCCCCAGGGCGGCGGCGCAGGCCGGGGCGGAGCGGGAGGA
GGCCGGGGCGGAGCAGGAGGAGGCCCGGGCGGAGGAGGAGAGCCGGCGGTAGCGG
CAGTGGCAGCGGCGAGAGCTTGGGCGGCCGCCGCCGCCTCCTCGCGAGCGCCGCGC
GCCCGGGTCCCGCTCGCATGCAAGTCACGTCCGCCCCCTCGGCGCGGCCGCCCCGAG
ACGCCGGCCCCGCTGAGTGATGAGAACAGACGTCAAACTGCCTTATGAATATTGAT
GCGGAGGCTAGGCTGCTTTCGTAGAGAAGCAGAAGGAAGCAAGATGGCTGCCCTTT
AGGATTTGTTAGAAAGGAGACCCGACTGCAACTGCTGGATTGCTGCAAGGCTGAGG
GACGAGAACGAGGCTGGCAAACATTCAGCAGCACACCCTCTCAAGATTGTTTACTTG
CCTTTGCTCCTGTTGAGTTACAACGCTTGGAAGCAGGAGATGGGCTCAGCAGCAGCC
AATAGGACATGATCCAGGAAGAGCAAATTCAACTAGAGGGCAGCCTTGTGGATGGC
CCCGAAGCAAGCCTGATGGAACAGGATAGAACCAACCATGTTGAGGGCAACAGACT
AAGTCCATTCCTGATACCATCACCTCCCATTTGCCAGACAGAACCTCTGGCTACAAA
GCTCCAGAATGGAAGCCCACTGCCTGAGAGAGCTCATCCAGAAGTAAATGGAGACA
CCAAGTGGCACTCTTTCAAAAGTTATTATGGAATACCCTGTATGAAGGGAAGCCAGA
ATAGTCGTGTGAGTCCTGACTTTACACAAGAAAGTAGAGGGTATTCCAAGTGTTTGC
AAAATGGAGGAATAAAACGCACAGTTAGTGAACCTTCTCTCTCTGGGCTCCTTCAGA
TCAAGAAATTGAAACAAGACCAAAAGGCTAATGGAGAAAGACGTAACTTCGGGGTA
AGCCAAGAAAGAAATCCAGGTGAAAGCAGTCAACCAAATGTCTCCGATTTGAGTGA
TAAGAAAGAATCTGTGAGTTCTGTAGCCCAAGAAAATGCAGTTAAAGATTTCACCA
GTTTTTCAACACATAACTGCAGTGGGCCTGAAAATCCAGAGCTTCAGATTCTGAATG
AGCAGGAGGGGAAAAGTGCTAATTACCATGACAAGAACATTGTATTACTTAAAAAC
AAGGCAGTGCTAATGCCTAATGGTGCTACAGTTTCTGCCTCTTCCGTGGAACACACA
CATGGTGAACTCCTGGAAAAAACACTGTCTCAATATTATCCAGATTGTGTTTCCATT
GCGGTGCAGAAAACCACATCTCACATAAATGCCATTAACAGTCAGGCTACTAATGA
GTTGTCCTGTGAGATCACTCACCCATCGCATACCTCAGGGCAGATCAATTCCGCACA
GACCTCTAACTCTGAGCTGCCTCCAAAGCCAGCTGCAGTGGTGAGTGAGGCCTGTGA
TGCTGATGATGCTGATAATGCCAGTAAACTAGCTGCAATGCTAAATACCTGTTCCTT
TCAGAAACCAGAACAACTACAACAACAAAAATCAGTTTTTGAGATATGCCCATCTCC
TGCAGAAAATAACATCCAGGGAACCACAAAGCTAGCGTCTGGTGAAGAATTCTGTT
CAGGTTCCAGCAGCAATTTGCAAGCTCCTGGTGGCAGCTCTGAACGGTATTTAAAAC
AAAATGAAATGAATGGTGCTTACTTCAAGCAAAGCTCAGTGTTCACTAAGGATTCCT
TTTCTGCCACTACCACACCACCACCACCATCACAATTGCTTCTTTCTCCCCCTCCTCC
TCTTCCACAGGTTCCTCAGCTTCCTTCAGAAGGAAAAAGCACTCTGAATGGTGGAGT
TTTAGAAGAACACCACCACTACCCCAACCAAAGTAACACAACACTTTTAAGGGAAG
TGAAAATAGAGGGTAAACCTGAGGCACCACCTTCCCAGAGTCCTAATCCATCTACA
CATGTATGCAGCCCTTCTCCGATGCTTTCTGAAAGGCCTCAGAATAATTGTGTGAAC
AGGAATGACATACAGACTGCAGGGACAATGACTGTTCCATTGTGTTCTGAGAAAAC
AAGACCAATGTCAGAACACCTCAAGCATAACCCACCAATTTTTGGTAGCAGTGGAG
AGCTACAGGACAACTGCCAGCAGTTGATGAGAAACAAAGAGCAAGAGATTCTGAAG
GGTCGAGACAAGGAGCAAACACGAGATCTTGTGCCCCCAACACAGCACTATCTGAA
ACCAGGATGGATTGAATTGAAGGCCCCTCGTTTTCACCAAGCGGAATCCCATCTAAA
ACGTAATGAGGCATCACTGCCATCAATTCTTCAGTATCAACCCAATCTCTCCAATCA
AATGACCTCCAAACAATACACTGGAAATTCCAACATGCCTGGGGGGCTCCCAAGGC
AAGCTTACACCCAGAAAACAACACAGCTGGAGCACAAGTCACAAATGTACCAAGTT
GAAATGAATCAAGGGCAGTCCCAAGGTACAGTGGACCAACATCTCCAGTTCCAAAA
ACCCTCACACCAGGTGCACTTCTCCAAAACAGACCATTTACCAAAAGCTCATGTGCA
GTCACTGTGTGGCACTAGATTTCATTTTCAACAAAGAGCAGATTCCCAAACTGAAAA
ACTTATGTCCCCAGTGTTGAAACAGCACTTGAATCAACAGGCTTCAGAGACTGAGCC
ATTTTCAAACTCACACCTTTTGCAACATAAGCCTCATAAACAGGCAGCACAAACACA
ACCATCCCAGAGTTCACATCTCCCTCAAAACCAGCAACAGCAGCAAAAATTACAAA
TAAAGAATAAAGAGGAAATACTCCAGACTTTTCCTCACCCCCAAAGCAACAATGAT
CAGCAAAGAGAAGGATCATTCTTTGGCCAGACTAAAGTGGAAGAATGTTTTCATGG
TGAAAATCAGTATTCAAAATCAAGCGAGTTCGAGACTCATAATGTCCAAATGGGAC
TGGAGGAAGTACAGAATATAAATCGTAGAAATTCCCCTTATAGTCAGACCATGAAA
TCAAGTGCATGCAAAATACAGGTTTCTTGTTCAAACAATACACACCTAGTTTCAGAG
AATAAAGAACAGACTACACATCCTGAACTTTTTGCAGGAAACAAGACCCAAAACTT
GCATCACATGCAATATTTTCCAAATAATGTGATCCCAAAGCAAGATCTTCTTCACAG
GTGCTTTCAAGAACAGGAGCAGAAGTCACAACAAGCTTCAGTTCTACAGGGATATA
AAAATAGAAACCAAGATATGTCTGGTCAACAAGCTGCGCAACTTGCTCAGCAAAGG
TACTTGATACATAACCATGCAAATGTTTTTCCTGTGCCTGACCAGGGAGGAAGTCAC
ACTCAGACCCCTCCCCAGAAGGACACTCAAAAGCATGCTGCTCTAAGGTGGCATCTC
TTACAGAAGCAAGAACAGCAGCAAACACAGCAACCCCAAACTGAGTCTTGCCATAG
TCAGATGCACAGGCCAATTAAGGTGGAACCTGGATGCAAGCCACATGCCTGTATGC
ACACAGCACCACCAGAAAACAAAACATGGAAAAAGGTAACTAAGCAAGAGAATCC
ACCTGCAAGCTGTGATAATGTGCAGCAAAAGAGCATCATTGAGACCATGGAGCAGC
ATCTGAAGCAGTTTCACGCCAAGTCGTTATTTGACCATAAGGCTCTTACTCTCAAAT
CACAGAAGCAAGTAAAAGTTGAAATGTCAGGGCCAGTCACAGTTTTGACTAGACAA
ACCACTGCTGCAGAACTTGATAGCCACACCCCAGCTTTAGAGCAGCAAACAACTTCT
TCAGAAAAGACACCAACCAAAAGAACAGCTGCTTCTGTTCTCAATAATTTTATAGAG
TCACCTTCCAAATTACTAGATACTCCTATAAAAAATTTATTGGATACACCTGTCAAG
ACTCAATATGATTTCCCATCTTGCAGATGTGTAGAGCAAATTATTGAAAAAGATGAA
GGTCCTTTTTATACCCATCTAGGAGCAGGTCCTAATGTGGCAGCTATTAGAGAAATC
ATGGAAGAAAGGTTTGGACAGAAGGGTAAAGCTATTAGGATTGAAAGAGTCATCTA
TACTGGTAAAGAAGGCAAAAGTTCTCAGGGATGTCCTATTGCTAAGTGGGTGGTTCG
CAGAAGCAGCAGTGAAGAGAAGCTACTGTGTTTGGTGCGGGAGCGAGCTGGCCACA
CCTGTGAGGCTGCAGTGATTGTGATTCTCATCCTGGTGTGGGAAGGAATCCCGCTGT
CTCTGGCTGACAAACTCTACTCGGAGCTTACCGAGACGCTGAGGAAATACGGCACG
CTCACCAATCGCCGGTGTGCCTTGAATGAAGAGAGAACTTGCGCCTGTCAGGGGCTG
GATCCAGAAACCTGTGGTGCCTCCTTCTCTTTTGGTTGTTCATGGAGCATGTACTACA
ATGGATGTAAGTTTGCCAGAAGCAAGATCCCAAGGAAGTTTAAGCTGCTTGGGGAT
GACCCAAAAGAGGAAGAGAAACTGGAGTCTCATTTGCAAAACCTGTCCACTCTTAT
GGCACCAACATATAAGAAACTTGCACCTGATGCATATAATAATCAGATTGAATATG
AACACAGAGCACCAGAGTGCCGTCTGGGTCTGAAGGAAGGCCGTCCATTCTCAGGG
GTCACTGCATGTTTGGACTTCTGTGCTCATGCCCACAGAGACTTGCACAACATGCAG
AATGGCAGCACATTGGTATGCACTCTCACTAGAGAAGACAATCGAGAATTTGGAGG
AAAACCTGAGGATGAGCAGCTTCACGTTCTGCCTTTATACAAAGTCTCTGACGTGGA
TGAGTTTGGGAGTGTGGAAGCTCAGGAGGAGAAAAAACGGAGTGGTGCCATTCAGG
TACTGAGTTCTTTTCGGCGAAAAGTCAGGATGTTAGCAGAGCCAGTCAAGACTTGCC
GACAAAGGAAACTAGAAGCCAAGAAAGCTGCAGCTGAAAAGCTTTCCTCCCTGGAG
AACAGCTCAAATAAAAATGAAAAGGAAAAGTCAGCCCCATCACGTACAAAACAAA
CTGAAAACGCAAGCCAGGCTAAACAGTTGGCAGAACTTTTGCGACTTTCAGGACCA
GTCATGCAGCAGTCCCAGCAGCCCCAGCCTCTACAGAAGCAGCCACCACAGCCCCA
GCAGCAGCAGAGACCCCAGCAGCAGCAGCCACATCACCCTCAGACAGAGTCTGTCA
ACTCTTATTCTGCTTCTGGATCCACCAATCCATACATGAGACGGCCCAATCCAGTTA
GTCCTTATCCAAACTCTTCACACACTTCAGATATCTATGGAAGCACCAGCCCTATGA
ACTTCTATTCCACCTCATCTCAAGCTGCAGGTTCATATTTGAATTCTTCTAATCCCAT
GAACCCTTACCCTGGGCTTTTGAATCAGAATACCCAATATCCATCATATCAATGCAA
TGGAAACCTATCAGTGGACAACTGCTCCCCATATCTGGGTTCCTATTCTCCCCAGTCT
CAGCCGATGGATCTGTATAGGTATCCAAGCCAAGACCCTCTGTCTAAGCTCAGTCTA
CCACCCATCCATACACTTTACCAGCCAAGGTTTGGAAATAGCCAGAGTTTTACATCT
AAATACTTAGGTTATGGAAACCAAAATATGCAGGGAGATGGTTTCAGCAGTTGTAC
CATTAGACCAAATGTACATCATGTAGGGAAATTGCCTCCTTATCCCACTCATGAGAT
GGATGGCCACTTCATGGGAGCCACCTCTAGATTACCACCCAATCTGAGCAATCCAAA
CATGGACTATAAAAATGGTGAACATCATTCACCTTCTCACATAATCCATAACTACAG
TGCAGCTCCGGGCATGTTCAACAGCTCTCTTCATGCCCTGCATCTCCAAAACAAGGA
GAATGACATGCTTTCCCACACAGCTAATGGGTTATCAAAGATGCTTCCAGCTCTTAA
CCATGATAGAACTGCTTGTGTCCAAGGAGGCTTACACAAATTAAGTGATGCTAATGG
TCAGGAAAAGCAGCCATTGGCACTAGTCCAGGGTGTGGCTTCTGGTGCAGAGGACA
ACGATGAGGTCTGGTCAGACAGCGAGCAGAGCTTTCTGGATCCTGACATTGGGGGA
GTGGCCGTGGCTCCAACTCATGGGTCAATTCTCATTGAGTGTGCAAAGCGTGAGCTG
CATGCCACAACCCCTTTAAAGAATCCCAATAGGAATCACCCCACCAGGATCTCCCTC
GTCTTTTACCAGCATAAGAGCATGAATGAGCCAAAACATGGCTTGGCTCTTTGGGAA
GCCAAAATGGCTGAAAAAGCCCGTGAGAAAGAGGAAGAGTGTGAAAAGTATGGCC
CAGACTATGTGCCTCAGAAATCCCATGGCAAAAAAGTGAAACGGGAGCCTGCTGAG
CCACATGAAACTTCAGAGCCCACTTACCTGCGTTTCATCAAGTCTCTTGCCGAAAGG
ACCATGTCCGTGACCACAGACTCCACAGTAACTACATCTCCATATGCCTTCACTCGG
GTCACAGGGCCTTACAACAGATATATATGAAGATATATATGATATCACCCCCTTTTG
TTGGTTACCTCACTTGAAAAGACCACAACCAACCTGTCAGTAGTATAGTTCTCATGA
CGTGGGCAGTGGGGAAAGGTCACAGTATTCATGACAAATGTGGTGGGAAAAACCTC
AGCTCACCAGCAACAAAAGAGGTTATCTTACCATAGCACTTAATTTTCACTGGCTCC
CAAGTGGTCACAGATGGCATCTAGGAAAAGACCAAAGCATTCTATGCAAAAAGAAG
GTGGGGAAGAAAGTGTTCCGCAATTTACATTTTTAAACACTGGTTCTATTATTGGAC
GAGATGATATGTAAATGTGATCCCCCCCCCCCGCTTACAACTCTACACATCTGTGAC
CACTTTTAATAATATCAAGTTTGCATAGTCATGGAACACAAATCAAACAAGTACTGT
AGTATTACAGTGACAGGAATCTTAAAATACCATCTGGTGCTGAATATATGATGTACT
GAAATACTGGAATTATGGCTTTTTGAAATGCAGTTTTTACTGTAATCTTAACTTTTAT
TTATCAAAATAGCTACAGGAAACATGAATAGCAGGAAAACACTGAATTTGTTTGGA
TGTTCTAAGAAATGGTGCTAAGAAAATGGTGTCTTTAATAGCTAAAAATTTAATGCC
TTTATATCATCAAGATGCTATCAGTGTACTCCAGTGCCCTTGAATAATAGGGGTACC
TTTTCATTCAAGTTTTTATCATAATTACCTATTCTTACACAAGCTTAGTTTTTAAAATG
TGGACATTTTAAAGGCCTCTGGATTTTGCTCATCCAGTGAAGTCCTTGTAGGACAAT
AAACGTATATATGTACATATATACACAAACATGTATATGTGCACACACATGTATATG
TATAAATATTTTAAATGGTGTTTTAGAAGCACTTTGTCTACCTAAGCTTTGACAACTT
GAACAATGCTAAGGTACTGAGATGTTTAAAAAACAAGTTTACTTTCATTTTAGAATG
CAAAGTTGATTTTTTTAAGGAAACAAAGAAAGCTTTTAAAATATTTTTGCTTTTAGCC
ATGCATCTGCTGATGAGCAATTGTGTCCATTTTTAACACAGCCAGTTAAATCCACCA
TGGGGCTTACTGGATTCAAGGGAATACGTTAGTCCACAAAACATGTTTTCTGGTGCT
CATCTCACATGCTATACTGTAAAACAGTTTTATACAAAATTGTATGACAAGTTCATT
GCTCAAAAATGTACAGTTTTAAGAATTTTCTATTAACTGCAGGTAATAATTAGCTGC
ATGCTGCAGACTCAACAAAGCTAGTTCACTGAAGCCTATGCTATTTTATGGATCATA
GGCTCTTCAGAGAACTGAATGGCAGTCTGCCTTTGTGTTGATAATTATGTACATTGT
GACGTTGTCATTTCTTAGCTTAAGTGTCCTCTTTAACAAGAGGATTGAGCAGACTGA
TGCCTGCATAAGATGAATAAACAGGGTTAGTTCCATGTGAATCTGTCAGTTAAAAAG
AAACAAAAACAGGCAGCTGGTTTGCTGTGGTGGTTTTAAATCATTAATTTGTATAAA
GAAGTGAAAGAGTTGTATAGTAAATTAAATTGTAAACAAAACTTTTTTAATGCAATG
CTTTAGTATTTTAGTACTGTAAAAAAATTAAATATATACATATATATATATATATATA
TATATATATATATGAGTTTGAAGCAGAATTCACATCATGATGGTGCTACTCAGCCTG
CTACAAATATATCATAATGTGAGCTAAGAATTCATTAAATGTTTGAGTGATGTTCCT
ACTTGTCATATACCTCAACACTAGTTTGGCAATAGGATATTGAACTGAGAGTGAAAG
CATTGTGTACCATCATTTTTTTCCAAGTCCTTTTTTTTATTGTTAAAAAAAAAAGCAT
ACCTTTTTTCAATACTTGATTTCTTAGCAAGTATAACTTGAACTTCAACCTTTTTGTTC
TAAAAATTCAGGGATATTTCAGCTCATGCTCTCCCTATGCCAACATGTCACCTGTGTT
TATGTAAAATTGTTGTAGGTTAATAAATATATTCTTTGTCAGGGATTTAACCCTTTTA
TTTTGAATCCCTTCTATTTTACTTGTACATGTGCTGATGTAACTAAAACTAATTTTGT
AAATCTGTTGGCTCTTTTTATTGTAAAGAAAAGCATTTTAAAAGTTTGAGGAATCTTT
TGACTGTTTCAAGCAGGAAAAAAAAATTACATGAAAATAGAATGCACTGAGTTGAT
AAAGGGAAAAATTGTAAGGCAGGAGTTTGGCAAGTGGCTGTTGGCCAGAGACTTAC
TTGTAACTCTCTAAATGAAGTTTTTTTGATCCTGTAATCACTGAAGGTACATACTCCA
TGTGGACTTCCCTTAAACAGGCAAACACCTACAGGTATGGTGTGCAACAGATTGTAC
AATTACATTTTGGCCTAAATACATTTTTGCTTACTAGTATTTAAAATAAATTCTTAAT
CAGAGGAGGCCTTTGGGTTTTATTGGTCAAATCTTTGTAAGCTGGCTTTTGTCTTTTT
AAAAAATTTCTTGAATTTGTGGTTGTGTCCAATTTGCAAACATTTCCAAAAATGTTTG
CTTTGCTTACAAACCACATGATTTTAATGTTTTTTGTATACCATAATATCTAGCCCCA
AACATTTGATTACTACATGTGCATTGGTGATTTTGATCATCCATTCTTAATATTTGAT
TTCTGTGTCACCTACTGTCATTTGTTAAACTGCTGGCCAACAAGAACAGGAAGTATA
GTTTGGGGGGTTGGGGAGAGTTTACATAAGGAAGAGAAGAAATTGAGTGGCATATT
GTAAATATCAGATCTATAATTGTAAATATAAAACCTGCCTCAGTTAGAATGAATGGA
AAGCAGATCTACAATTTGCTAATATAGGAATATCAGGTTGACTATATAGCCATACTT
GAAAATGCTTCTGAGTGGTGTCAACTTTACTTGAATGAATTTTTCATCTTGATTGACG
CACAGTGATGTACAGTTCACTTCTGAAGCTAGTGGTTAACTTGTGTAGGAAACTTTT
GCAGTTTGACACTAAGATAACTTCTGTGTGCATTTTTCTATGCTTTTTTAAAAACTAG
TTTCATTTCATTTTCATGAGATGTTTGGTTTATAAGATCTGAGGATGGTTATAAATAC
TGTAAGTATTGTAATGTTATGAATGCAGGTTATTTGAAAGCTGTTTATTATTATATCA
TTCCTGATAATGCTATGTGAGTGTTTTTAATAAAATTTATATTTATTTAATGCACTCT
AAGTGTTGTCTTCCT

[0415] By “transforming growth factor receptor 2 (TGFBRII) polypeptide” is meant a protein having at least about 85% sequence identity to NCBI Accession No. ABG65632.1 or a fragment thereof and having immunosuppressive activity. An exemplary amino acid sequence is provided below.

>ABG65632.1 transforming growth factor beta receptor II [Homo sapiens]

MGRGLLRGLWPLHIVLWTRIASTIPPHVQKSVNNDMIVTDNNGAVKFPQL
CKFCDVRFSTCDNQKSCMSNCSITSICEKPQEVCVAVWRKNDENITLETV
CHDPKLPYHDFILEDAASPKCIMKEKKKPGETFFMCSCSSDECNDNIIFS
EEYNTSNPDLLLVIFQVTGISLLPPLGVAISVIIIFYCYRVNRQQKLSST
WETGKTRKLMEFSEHCAIILEDDRSDISSTCANNINHNTELLPIELDTLV
GKGRFAEVYKAKLKQNTSEQFETVAVKIFPYEEYASWKTEKDIFSDINLK
HENILQFLTAEERKTELGKQYWLITAFHAKGNLQEYLTRHVISWEDLRKL
GSSLARGIAHLHSDHTPCGRPKMPIVHRDLKSSNILVKNDLTCCLCDFGL
SLRLDPTLSVDDLANSGQVGTARYMAPEVLESRMNLENVESFKQTDVYSM
ALVLWEMTSRCNAVGEVKDYEPPFGSKVREHPCVESMKDNVLRDRGRPEI
PSFWLNHQGIQMVCETLTECWDHDPEARLTAQCVAERFSELEHLDRLSGR
SCSEEKIPEDGSLNTTK

[0416] By “transforming growth factor receptor 2 (TGFBRII) polynucleotide” is meant a nucleic acid that encodes a TGFBRII polypeptide. The TGFBRII gene encodes a transmembrane protein having serine/threonine kinase activity. An exemplary TGFBRII nucleic acid is provided below.

>M85079.1 Human TGF-beta type II receptor mRNA, complete cds

GTTGGCGAGGAGTTTCCTGTTTCCCCCGCAGCGCTGAGTTGAAGTTGAGT
GAGTCACTCGCGCGCACGGAGCGACGACACCCCCGCGCGTGCACCCGCTC
GGGACAGGAGCCGGACTCCTGTGCAGCTTCCCTCGGCCGCCGGGGGCCTC
CCCGCGCCTCGCCGGCCTCCAGGCCCCTCCTGGCTGGCGAGCGGGCGCCA
CATCTGGCCCGCACATCTGCGCTGCCGGCCCGGCGCGGGGTCCGGAGAGG
GCGCGGCGCGGAGCGCAGCCAGGGGTCCGGGAAGGCGCCGTCCGTGCGCT
GGGGGCTCGGTCTATGACGAGCAGCGGGGTCTGCCATGGGTCGGGGGCTG
CTCAGGGGCCTGTGGCCGCTGCACATCGTCCTGTGGACGCGTATCGCCAG
CACGATCCCACCGCACGTTCAGAAGTCGGTTAATAACGACATGATAGTCA
CTGACAACAACGGTGCAGTCAAGTTTCCACAACTGTGTAAATTTTGTGAT
GTGAGATTTTCCACCTGTGACAACCAGAAATCCTGCATGAGCAACTGCAG
CATCACCTCCATCTGTGAGAAGCCACAGGAAGTCTGTGTGGCTGTATGGA
GAAAGAATGACGAGAACATAACACTAGAGACAGTTTGCCATGACCCCAAG
CTCCCCTACCATGACTTTATTCTGGAAGATGCTGCTTCTCCAAAGTGCAT
TATGAAGGAAAAAAAAAAGCCTGGTGAGACTTTCTTCATGTGTTCCTGTA
GCTCTGATGAGTGCAATGACAACATCATCTTCTCAGAAGAATATAACACC
AGCAATCCTGACTTGTTGCTAGTCATATTTCAAGTGACAGGCATCAGCCT
CCTGCCACCACTGGGAGTTGCCATATCTGTCATCATCATCTTCTACTGCT
ACCGCGTTAACCGGCAGCAGAAGCTGAGTTCAACCTGGGAAACCGGCAAG
ACGCGGAAGCTCATGGAGTTCAGCGAGCACTGTGCCATCATCCTGGAAGA
TGACCGCTCTGACATCAGCTCCACGTGTGCCAACAACATCAACCACAACA
CAGAGCTGCTGCCCATTGAGCTGGACACCCTGGTGGGGAAAGGTCGCTTT
GCTGAGGTCTATAAGGCCAAGCTGAAGCAGAACACTTCAGAGCAGTTTGA
GACAGTGGCAGTCAAGATCTTTCCCTATGAGGAGTATGCCTCTTGGAAGA
CAGAGAAGGACATCTTCTCAGACATCAATCTGAAGCATGAGAACATACTC
CAGTTCCTGACGGCTGAGGAGCGGAAGACGGAGTTGGGGAAACAATACTG
GCTGATCACCGCCTTCCACGCCAAGGGCAACCTACAGGAGTACCTGACGC
GGCATGTCATCAGCTGGGAGGACCTGCGCAAGCTGGGCAGCTCCCTCGCC
CGGGGGATTGCTCACCTCCACAGTGATCACACTCCATGTGGGAGGCCCAA
GATGCCCATCGTGCACAGGGACCTCAAGAGCTCCAATATCCTCGTGAAGA
ACGACCTAACCTGCTGCCTGTGTGACTTTGGGCTTTCCCTGCGTCTGGAC
CCTACTCTGTCTGTGGATGACCTGGCTAACAGTGGGCAGGTGGGAACTGC
AAGATACATGGCTCCAGAAGTCCTAGAATCCAGGATGAATTTGGAGAATG
CTGAGTCCTTCAAGCAGACCGATGTCTACTCCATGGCTCTGGTGCTCTGG
GAAATGACATCTCGCTGTAATGCAGTGGGAGAAGTAAAAGATTATGAGCC
TCCATTTGGTTCCAAGGTGCGGGAGCACCCCTGTGTCGAAAGCATGAAGG
ACAACGTGTTGAGAGATCGAGGGCGACCAGAAATTCCCAGCTTCTGGCTC
AACCACCAGGGCATCCAGATGGTGTGTGAGACGTTGACTGAGTGCTGGGA
CCACGACCCAGAGGCCCGTCTCACAGCCCAGTGTGTGGCAGAACGCTTCA
GTGAGCTGGAGCATCTGGACAGGCTCTCGGGGAGGAGCTGCTCGGAGGAG
AAGATTCCTGAAGACGGCTCCCTAAACACTACCAAATAGCTCTTATGGGG
CAGGCTGGGCATGTCCAAAGAGGCTGCCCCTCTCACCAAA

[0417] By “T Cell Immunoreceptor with Ig and ITIM Domains (TIGIT) polypeptide” is meant a protein having at least about 85% sequence identity to NCBI Accession No. ACD74757.1 or a fragment thereof and having immunomodulatory activity. An exemplary TIGIT amino acid sequence is provided below.

>ACD74757.1 T cell immunoreceptor with Ig and ITIM domains [Homo sapiens]

MRWCLLLIWAQGLRQAPLASGMMTGTIETTGNISAEKGGSIILQCHLSST
TAQVTQVNWEQQDQLLAICNADLGWHISPSFKDRVAPGPGLGLTLQSLTV
NDTGEYFCIYHTYPDGTYTGRIFLEVLESSVAEHGARFQIPLLGAMAATL
VVICTAVIVVVALTRKKKALRIHSVEGDLRRKSAGQEEWSPSAPSPPGSC
VQAEAAPAGLCGEQRGEDCAELHDYFNVLSYRSLGNCSFFTETG

[0418] By “T Cell Immunoreceptor With Ig And ITIM Domains (TIGIT) polynucleotide” is meant a nucleic acid encoding a TIGIT polypeptide. The TIGIT gene encodes an inhibitory immune receptor that is associated with neoplasia and T cell exhaustion. An exemplary nucleic acid sequence is provided below.

>EU675310.1 Homo sapiens T cell immunoreceptor with Ig and ITIM domains (TIGIT) mRNA, complete cds

CGTCCTATCTGCAGTCGGCTACTTTCAGTGGCAGAAGAGGCCACATCTGC
TTCCTGTAGGCCCTCTGGGCAGAAGCATGCGCTGGTGTCTCCTCCTGATC
TGGGCCCAGGGGCTGAGGCAGGCTCCCCTCGCCTCAGGAATGATGACAGG
CACAATAGAAACAACGGGGAACATTTCTGCAGAGAAAGGTGGCTCTATCA
TCTTACAATGTCACCTCTCCTCCACCACGGCACAAGTGACCCAGGTCAAC
TGGGAGCAGCAGGACCAGCTTCTGGCCATTTGTAATGCTGACTTGGGGTG
GCACATCTCCCCATCCTTCAAGGATCGAGTGGCCCCAGGTCCCGGCCTGG
GCCTCACCCTCCAGTCGCTGACCGTGAACGATACAGGGGAGTACTTCTGC
ATCTATCACACCTACCCTGATGGGACGTACACTGGGAGAATCTTCCTGGA
GGTCCTAGAAAGCTCAGTGGCTGAGCACGGTGCCAGGTTCCAGATTCCAT
TGCTTGGAGCCATGGCCGCGACGCTGGTGGTCATCTGCACAGCAGTCATC
GTGGTGGTCGCGTTGACTAGAAAGAAGAAAGCCCTCAGAATCCATTCTGT
GGAAGGTGACCTCAGGAGAAAATCAGCTGGACAGGAGGAATGGAGCCCCA
GTGCTCCCTCACCCCCAGGAAGCTGTGTCCAGGCAGAAGCTGCACCTGCT
GGGCTCTGTGGAGAGCAGCGGGGAGAGGACTGTGCCGAGCTGCATGACTA
CTTCAATGTCCTGAGTTACAGAAGCCTGGGTAACTGCAGCTTCTTCACAG
AGACTGGTTAGCAACCAGAGGCATCTTCTGG

[0419] By “T Cell Receptor Alpha Constant (TRAC) polypeptide” is meant a protein having at least about 85% amino acid sequence identity to NCBI Accession No. P01848.2 or fragment thereof and having immunomodulatory activity. An exemplary amino acid sequence is provided below.

>sp|P01848.2|TRAC_HUMAN RecName: Full=T cell receptor alpha constant

IQNPDPAVYQLRDSKSSDKSVCLFTDFDSQTNVSQSKDSDVYITDKTVLD
MRSMDFKSNSAVAWSNKSDFACANAFNNSIIPEDTFFPSPESSCDVKLVE
KSFETDTNLNFQNLSVIGFRILLLKVAGFNLLMTLRLWSS

[0420] By “T Cell Receptor Alpha Constant (TRAC) polynucleotide” is meant a nucleic acid encoding a TRAC polypeptide. Exemplary TRAC nucleic acid sequences are provided below.

UCSC human genome database, Gene ENSG00000277734.8 Human T-cell receptor alpha chain (TCR-alpha)

catgctaatcctccggcaaacctctgtttcctcctcaaaaggcaggaggt
cggaaagaataaacaatgagagtcacattaaaaacacaaaatcctacgga
aatactgaagaatgagtctcagcactaaggaaaagcctccagcagctcct
gattctgagggtgaaggatagacgctgtggctctgcatgactcactagca
ctctatcacggccatattctggcagggtcagtggctccaactaacatttg
tttggtactttacagtttattaaatagatgatatatggagaagctctcat
ttattctcagaagagcctggctaggaaggtggatgaggcaccatattcat
tttgcaggtgaaattcctgagatgtaaggagctgctgtgacttgctcaag
gccttatatcgagtaaacggtagtgctggggcttagacgcaggtgttctg
atttatagttcaaaacctctatcaatgagagagcaatctcctggtaatgt
gatagatttcccaacttaatgccaacataccataaacctcccattctgct
aatgcccagcctaagttggggagaccactccagattccaagatgtacagt
ttgattgctgggccatttcccatgcctgcctttactctgccagagttata
ttgctggggttttgaagaagatcctattaaataaaagaataagcagtatt
attaagtagccctgcatttcaggtttccttgagtggcaggccaggcctgg
ccgtgaacgttcactgaaatcatggcctcttggccaagattgatagcttg
tgcctgtccctgagtcccagtccatcacgagcagctggatctaagatgct
atttcccgtataaagcatgagaccgtgacttgccagccccacagagcccc
gcccttgtccatcactggcatctggactccagcctgggttggggcaaaga
gggaaatgagatcatgtcctaaccctgatcctcttgtcccacagATATCC
AGAACCCTGACCCTGCCGTGTACCAGCTGAGAGACTCTAAATCCAGTGAC
AAGTCTGTCTGCCTATTCACCGATTTTGATTCTCAAACAAATGTGTCACA
AAGTAAGGATTCTGATGTGTATATCACAGACAAAACTGTGCTAGACATGA
GGTCTATGGACTTCAAGAGCAACAGTGCTGTGGCCTGGAGCAACAAATCT
GACTTTGCATGTGCAAACGCCTTCAACAACAGCATTATTCCAGAAGACAC
CTTCTTCCCCAGCCCAGgtaagggcagattggtgccttcgcaggctgttt
ccttgcttcaggaatggccaggttctgcccagagctctggtcaatgatgt
ctaaaactcctctgattggtggtctcggccttatccattgccaccaaaac
cctattttactaagaaacagtgagccttgttctggcagtccagagaatga
cacgggaaaaaagcagatgaagagaaggtggcaggagagggcacgtggcc
cagcctcagtctctccaactgagttcctgcctgcctgcattgctcagact
gtttgccccttactgctcttctaggcctcattctaagccccttctccaag
ttgcctctccttatttctccctgtctgccaaaaaatattcccagctcact
aagtcagtctcacgcagtcactcattaacccaccaatcactgattgtgcc
ggcacatgaatgcaccaggtgttgaagtggaggaattaaaaagtcagatg
aggggtgtgcccagaggaagcaccattctagttgggggagcccatctgtc
agctgggaaaagtccaaataacttcagattggaatgtgttttaactcagg
gttgagaaaacagctaccttcaggacaaaagtcagggaagggctctctga
agaaatgctacttgaagataccagccctaccaagggcagggagaggaccc
tatagaggcctgggacaggagctcaatgagaaaggagaagagcagcaggc
atgagttgaatgaaggaggcagggccgggtcacagggccttctaggccat
gagagggtagacagtattctaaggacgccagaaagctgttgatcggcttc
aagcaggggagggacacctaatttgcttttcttttttttttttttttttt
tttttttttttgagatggagttttgctcttgttgcccaggctggagtgca
atggtgcatcttggctcactgcaacctccgcctcccaggttcaagtgatt
ctcctgcctcagcctcccgagtagctgagattacaggcacccgccaccat
gcctggctaattttttgtatttttagtagagacagggtttcactatgttg
gccaggctggtctcgaactcctgacctcaggtgatccacccgcttcagcc
tcccaaagtgctgggattacaggcgtgagccaccacacccggcctgcttt
tcttaaagatcaatctgagtgctgtacggagagtgggttgtaagccaaga
gtagaagcagaaagggagcagttgcagcagagagatgatggaggcctggg
cagggtggtggcagggaggtaaccaacaccattcaggtttcaaaggtaga
accatgcagggatgagaaagcaaagaggggatcaaggaaggcagctggat
tttggcctgagcagctgagtcaatgatagtgccgtttactaagaagaaac
caaggaaaaaatttggggtgcagggatcaaaactttttggaacatatgaa
agtacgtgtttatactctttatggcccttgtcactatgtatgcctcgctg
cctccattggactctagaatgaagccaggcaagagcagggtctatgtgtg
atggcacatgtggccagggtcatgcaacatgtactttgtacaaacagtgt
atattgagtaaatagaaatggtgtccaggagccgaggtatcggtcctgcc
agggccaggggctctccctagcaggtgctcatatgctgtaagttccctcc
agatctctccacaaggaggcatggaaaggctgtagttgttcacctgccca
agaactaggaggtctggggtgggagagtcagcctgctctggatgctgaaa
gaatgtctgtattccttttagAAAGTTCCTGTGATGTCAAGCTGGTCGAG
AAAAGCTTTGAAACAGgtaagacaggggtctagcctgggtttgcacagga
ttgcggaagtgatgaacccgcaataaccctgcctggatgagggagtggga
agaaattagtagatgtgggaatgaatgatgaggaatggaaacagcggttc
aagacctgcccagagctgggtggggtctctcctgaatccctctcaccatc
tctgactttccattctaagcactttgaggatgagtttctagcttcaatag
accaaggactctctcctaggcctctgtattcctttcaacagctccactgt
caagagagccagagagagcttctgggtggcccagctgtgaaatttctgag
tcccttagggatagccctaaacgaaccagatcatcctgaggacagccaag
aggttttgccttattcaagacaagcaacagtactcacataggctgtgggc
aatggtcctgtctctcaagaatcccctgccactcctcacacccaccctgg
gcccatattcatttccatttgagttgttcttattgagtcatccttcctgt
ggtagcggaactcactaaggggcccatctggacccgaggtattgtgatga
taaattctgagcacctaccccatccccagaagggctcagaaataaaataa
gagccaagtctagtcggtgatcctgtcttgaaacacaatactgttggccc
tggaagaatgcacagaatctgtttgtaaggggatatgcacagaagctgca
agggacaggaggtgcaggagctgcaggcctcccccacccagcctgctctg
ccttggggaaaaccgtgggtgtgtcctgcaggccatgcaggcctgggaca
tgcaagcccataaccgctgtggcctcttggttttacagATACGAACCTAA
ACTTTCAAAACCTGTCAGTGATTGGGTTCCGAATCCTCCTCCTGAAAGTG
GCCGGGTTTAATCTGCTCATGACGCTGCGGCTGTGGTCCAGCTGAGgtga
ggggccttgaagctgggagtggggtttagggacgcgggtctctgggtgca
tcctaagctctgagagcaaacctccctgcagggtcttgcttttaagtcca
aagcctgagcccaccaaactctcctacttcttcctgttacaaattcctct
tgtgcaataataatggcctgaaacgctgtaaaatatcctcatttcagccg
cctcagttgcacttctcccctatgaggtaggaagaacagttgtttagaaa
cgaagaaactgaggccccacagctaatgagtggaggaagagagacacttg
tgtacaccacatgccttgtgttgtacttctctcaccgtgtaacctcctca
tgtcctctctccccagtacggctctcttagctcagtagaaagaagacatt
acactcatattacaccccaatcctggctagagtctccgcaccctcctccc
ccagggtccccagtcgtcttgctgacaactgcatcctgttccatcaccat
caaaaaaaaactccaggctgggtgcgggggctcacacctgtaatcccagc
actttgggaggcagaggcaggaggagcacaggagctggagaccagcctgg
gcaacacagggagaccccgcctctacaaaaagtgaaaaaattaaccaggt
gtggtgctgcacacctgtagtcccagctacttaagaggctgagatgggag
gatcgcttgagccctggaatgttgaggctacaatgagctgtgattgcgtc
actgcactccagcctggaagacaaagcaagatcctgtctcaaataataaa
aaaaataagaactccagggtacatttgctcctagaactctaccacatagc
cccaaacagagccatcaccatcacatccctaacagtcctgggtcttcctc
agtgtccagcctgacttctgttcttcctcattccagATCTGCAAGATTGT
AAGACAGCCTGTGCTCCCTCGCTCCTTCCTCTGCATTGCCCCTCTTCTCC
CTCTCCAAACAGAGGGAACTCTCCTACCCCCAAGGAGGTGAAAGCTGCTA
CCACCTCTGTGCCCCCCCGGCAATGCCACCAACTGGATCCTACCCGAATT
TATGATTAAGATTGCTGAAGAGCTGCCAAACACTGCTGCCACCCCCTCTG
TTCCCTTATTGCTGCTTGTCACTGCCTGACATTCACGGCAGAGGCAAGGC
TGCTGCAGCCTCCCCTGGCTGTGCACATTCCCTCCTGCTCCCCAGAGACT
GCCTCCGCCATCCCACAGATGATGGATCTTCAGTGGGTTCTCTTGGGCTC
TAGGTCCTGCAGAATGTTGTGAGGGGTTTATTTTTTTTTAATAGTGTTCA
TAAAGAAATACATAGTATTCTTCTTCTCAAGACGTGGGGGGAAATTATCT
CATTATCGAGGCCCTGCTATGCTGTGTATCTGGGCGTGTTGTATGTCCTG
CTGCCGATGCCTTCATTAAAATGATTTGGAAGAGCAGA

[0421] Nucleotides in lower cases above are untranslated regions or introns, and nucleotides in upper cases are exons.

[0422] >X02592.1 Human mRNA for T-cell receptor alpha chain (TCR-alpha)

TTTTGAAACCCTTCAAAGGCAGAGACTTGTCCAGCCT
AACCTGCCTGCTGCTCCTAGCTCCTGAGGCTCAGGGC
CCTTGGCTTCTGTCCGCTCTGCTCAGGGCCCTCCAGC
GTGGCCACTGCTCAGCCATGCTCCTGCTGCTCGTCCC
AGTGCTCGAGGTGATTTTTACCCTGGGAGGAACCAGA
GCCCAGTCGGTGACCCAGCTTGGCAGCCACGTCTCTG
TCTCTGAAGGAGCCCTGGTTCTGCTGAGGTGCAACTA
CTCATCGTCTGTTCCACCATATCTCTTCTGGTATGTG
CAATACCCCAACCAAGGACTCCAGCTTCTCCTGAAGT
ACACATCAGCGGCCACCCTGGTTAAAGGCATCAACGG
TTTTGAGGCTGAATTTAAGAAGAGTGAAACCTCCTTC
CACCTGACGAAACCCTCAGCCCATATGAGCGACGCGG
CTGAGTACTTCTGTGCTGTGAGTGATCTCGAACCGAA
CAGCAGTGCTTCCAAGATAATCTTTGGATCAGGGACC
AGACTCAGCATCCGGCCAAATATCCAGAACCCTGACC
CTGCCGTGTACCAGCTGAGAGACTCTAAATCCAGTGA
CAAGTCTGTCTGCCTATTCACCGATTTTGATTCTC
AAACAAATGTGTCACAAAGTAAGGATTCTGATGTGTA
TATCACAGACAAAACTGTGCTAGACATGAGGTCTATG
GACTTCAAGAGCAACAGTGCTGTGGCCTGGAGCAACAA
ATCTGACTTTGCATGTGCAAACGCCTTCAACAACAGC
ATTATTCCAGAAGACACCTTCTTCCCCAGCCCAGAAA
GTTCCTGTGATGTCAAGCTGGTCGAGAAAAGCTTTGA
AACAGATACGAACCTAAACTTTCAAAACCTGTCAGTG
ATTGGGTTCCGAATCCTCCTCCTGAAAGTGGCCGGGT
TTAATCTGCTCATGACGCTGCGGCTGTGGTCCAGCTG
AGATCTGCAAGATTGTAAGACAGCCTGTGCTCCCTCG
CTCCTTCCTCTGCATTGCCCCTCTTCTCCCTCTCCAA
ACAGAGGGAACTCTCCTACCCCCAAGGAGGTGAAAGC
TGCTACCACCTCTGTGCCCCCCCGGTAATGCCACCAA
CTGGATCCTACCCGAATTTATGATTAAGATTGCTGAA
GAGCTGCCAAACACTGCTGCCACCCCCTCTGTTCCCT
TATTGCTGCTTGTCACTGCCTGACATTCACGGCAGAG
GCAAGGCTGCTGCAGCCTCCCCTGGCTGTGCACATTC
CCTCCTGCTCCCCAGAGACTGCCTCCGCCATCCCACA
GATGATGGATCTTCAGTGGGTTCTCTTGGGCTCTAGG
TCCTGGAGAATGTTGTGAGGGGTTTATTTTTTTTTAA
TAGTGTTCATAAAGAAATACATAGTATTCTTCTTCTC
AAGACGTGGGGGGAAATTATCTCATTATCGAGGCCC
TGCTATGCTGTGTGTCTGGGCGTGTTGTATGTCCTG
CTGCCGATGCCTTCATTAAAATGATTTGGAA

[0423] By “T cell receptor beta constant 1 polypeptide (TRBC1)” is meant a protein having at least about 85% amino acid sequence identity to NCBI Accession No. P01850 or fragment thereof and having immunomodulatory activity. An exemplary amino acid sequence is provided below.

[0424] .>sp|P01850|TRBC1_HUMAN T cell receptor beta constant 1 OS═Homo sapiens OX=9606 GN=TRBC1 PE=1

SV = 4DLNKVFPPEVAVFEPSEAEISHTQKATLVCLATGFFPDHVELSW
WVNGKEVHSGVSTDPQPLKEQPALNDSRYCLSSRLRVSATFWQNPRNHFR
CQVQFYGLSENDEWTQDRAKPVTQIVSAEAWGRADCGFTSVSYQQGVLSA
TILYEILLGKATLYAVLVSALVLMAMVKRKDF

[0425] By “T cell receptor beta constant 1 polynucleotide (TRBC1)” is meant a nucleic acid encoding a TRBC1 polypeptide. An exemplary TRBC1 nucleic acid sequence is provided below.>

### X00437.1

CTGGTCTAGAATATTCCACATCTGCTCTCACTCTGCCATGGACTCCTGGA
CCTTCTGCTGTGTGTCCCTTTGCATCCTGGTAGCGAAGCATACAGATGCT
GGAGTTATCCAGTCACCCCGCCATGAGGTGACAGAGATGGGACAAGAAGT
GACTCTGAGATGTAAACCAATTTCAGGCCACAACTCCCTTTTCTGGTACA
GACAGACCATGATGCGGGGACTGGAGTTGCTCATTTACTTTAACAACAAC
GTTCCGATAGATGATTCAGGGATGCCCGAGGATCGATTCTCAGCTAAGAT
GCCTAATGCATCATTCTCCACTCTGAAGATCCAGCCCTCAGAACCCAGGG
ACTCAGCTGTGTACTTCTGTGCCAGCAGTTTCTCGACCTGTTCGGCTAAC
TATGGCTACACCTTCGGTTCGGGGACCAGGTTAACCGTTGTAGAGGACCT
GAACAAGGTGTTCCCACCCGAGGTCGCTGTGTTTGAGCCATCAGAAGCAG
AGATCTCCCACACCCAAAAGGCCACACTGGTGTGCCTGGCCACAGGCTTC
TTCCCCGACCACGTGGAGCTGAGCTGGTGGGTGAATGGGAAGGAGGTGCA
CAGTGGGGTCAGCACAGACCCGCAGCCCCTCAAGGAGCAGCCCGCCCTCA
ATGACTCCAGATACTGCCTGAGCAGCCGCCTGAGGGTCTCGGCCACCTTC
TGGCAGAACCCCCGCAACCACTTCCGCTGTCAAGTCCAGTTCTACGGGCT
CTCGGAGAATGACGAGTGGACCCAGGATAGGGCCAAACCCGTCACCCAGA
TCGTCAGCGCCGAGGCCTGGGGTAGAGCAGACTGTGGCTTTACCTCGGTG
TCCTACCAGCAAGGGGTCCTGTCTGCCACCATCCTCTATGAGATCCTGCT
AGGGAAGGCCACCCTGTATGCTGTGCTGGTCAGCGCCCTTGTGTTGATGG
CCATGGTCAAGAGAAAGGATTTCTGAAGGCAGCCCTGGAAGTGGAGTTAG
GAGCTTCTAACCCGTCATGGTTCAATACACATTCTTCTTTTGCCAGCGCT
TCTGAAGAGCTGCTCTCACCTCTCTGCATCCCAATAGATATCCCCCTATG
TGCATGCACACCTGCACACTCACGGCTGAAATCTCCCTAACCCAGGGGGA
C

[0427] By “T cell receptor beta constant 2 polypeptide (TRBC2)” is meant a protein having at least about 85% amino acid sequence identity to NCBI Accession No. A0A5B9 or fragment thereof and having immunomodulatory activity. An exemplary amino acid sequence is provided below.

.>sp|A0A5B9|TRBC2_HUMAN T cell receptor beta constant 2 OS═Homo sapiens OX=9606 GN=TRBC2 PE=1

SV = 2DLKNVFPPKVAVFEPSEAEISHTQKATLVCLATGFYPDHVELSW
WVNGKEVHSGVSTDPQPLKEQPALNDSRYCLSSRLRVSATFWQNPRNHFR
CQVQFYGLSENDEWTQDRAKPVTQIVSAEAWGRADCGFTSESYQQGVLSA
TILYEILLGKATLYAVLVSALVLMAMVKRKDSRG

[0428] By “T cell receptor beta constant 2 polynucleotide (TRBC2)” is meant a nucleic acid encoding a TRAC polypeptide. An exemplary TRBC2 nucleic acid sequence is provided below.

[0429] >NG_001333.2:655095-656583 Homo sapiens T cell receptor beta locus (TRB) on chromosome7

AGGACCTGAAAAACGTGTTCCCACCCGAGGTCGCTGTGTTTGAGCCATCA
GAAGCAGAGATCTCCCACACCCAAAAGGCCACACTGGTATGCCTGGCCAC
AGGCTTCTACCCCGACCACGTGGAGCTGAGCTGGTGGGTGAATGGGAAGG
AGGTGCACAGTGGGGTCAGCACAGACCCGCAGCCCCTCAAGGAGCAGCCC
GCCCTCAATGACTCCAGATACTGCCTGAGCAGCCGCCTGAGGGTCTCGGC
CACCTTCTGGCAGAACCCCCGCAACCACTTCCGCTGTCAAGTCCAGTTCT
ACGGGCTCTCGGAGAATGACGAGTGGACCCAGGATAGGGCCAAACCCGTC
ACCCAGATCGTCAGCGCCGAGGCCTGGGGTAGAGCAGGTGAGTGGGGCCT
GGGGAGATGCCTGGAGGAGATTAGGTGAGACCAGCTACCAGGGAAAATGG
AAAGATCCAGGTAGCGGACAAGACTAGATCCAGAAGAAAGCCAGAGTGGA
CAAGGTGGGATGATCAAGGTTCACAGGGTCAGCAAAGCACGGTGTGCACT
TCCCCCACCAAGAAGCATAGAGGCTGAATGGAGCACCTCAAGCTCATTCT
TCCTTCAGATCCTGACACCTTAGAGCTAAGCTTTCAAGTCTCCCTGAGGA
CCAGCCATACAGCTCAGCATCTGAGTGGTGTGCATCCCATTCTCTTCTGG
GGTCCTGGTTTCCTAAGATCATAGTGACCACTTCGCTGGCACTGGAGCAG
CATGAGGGAGACAGAACCAGGGCTATCAAAGGAGGCTGACTTTGTACTAT
CTGATATGCATGTGTTTGTGGCCTGTGAGTCTGTGATGTAAGGCTCAATG
TCCTTACAAAGCAGCATTCTCTCATCCATTTTTCTTCCCCTGTTTTCTTT
CAGACTGTGGCTTCACCTCCGGTAAGTGAGTCTCTCCTTTTTCTCTCTAT
CTTTCGCCGTCTCTGCTCTCGAACCAGGGCATGGAGAATCCACGGACACA
GGGGCGTGAGGGAGGCCAGAGCCACCTGTGCACAGGTGCCTACATGCTCT
GTTCTTGTCAACAGAGTCTTACCAGCAAGGGGTCCTGTCTGCCACCATCC
TCTATGAGATCTTGCTAGGGAAGGCCACCTTGTATGCCGTGCTGGTCAGT
GCCCTCGTGCTGATGGCCATGGTAAGGAGGAGGGTGGGATAGGGCAGATG
ATGGGGGCAGGGGATGGAACATCACACATGGGCATAAAGGAATCTCAGAG
CCAGAGCACAGCCTAATATATCCTATCACCTCAATGAAACCATAATGAAG
CCAGACTGGGGAGAAAATGCAGGGAATATCACAGAATGCATCATGGGAGG
ATGGAGACAACCAGCGAGCCCTACTCAAATTAGGCCTCAGAGCCCGCCTC
CCCTGCCCTACTCCTGCTGTGCCATAGCCCCTGAAACCCTGAAAATGTTC
TCTCTTCCACAGGTCAAGAGAAAGGATTCCAGAGGCTAG

[0430] As used herein “transduction” means to transfer a gene or genetic material to a cell via a viral vector.

[0431] “Transformation,” as used herein refers to the process of introducing a genetic change in a cell produced by the introduction of exogenous nucleic acid.

[0432] “Transfection” refers to the transfer of a gene or genetical material to a cell via a chemical or physical means.

[0433] By “translocation” is meant the rearrangement of nucleic acid segments between non-homologous chromosomes.

[0434] As used herein, the terms “treat,” treating,” “treatment,” and the like refer to reducing or ameliorating a disorder and/or a symptom associated therewith. It will be appreciated that, although not precluded, treating a disorder or condition does not require that the disorder, condition or symptoms associated therewith be eliminated.

[0435] The term “uracil glycosylase inhibitor” or “UGI,” as used herein, refers to a protein that is capable of inhibiting a uracil-DNA glycosylase base-excision repair enzyme. In some embodiments, the polypeptide further contains one or more (e.g., 1, 2, 3, 4, 5) Uracil glycosylase inhibitors. In some embodiments, a UGI domain comprises a wild-type UGI or a modified version thereof. In some embodiments, the UGI proteins provided herein include fragments of UGI and proteins homologous to a UGI or a UGI fragment. For example, in some embodiments, a UGI domain comprises a fragment of the amino acid sequence set forth herein below. In some embodiments, a UGI fragment comprises an amino acid sequence that comprises at least 60%, at least 65%, at least 70%, at least 75%, at least 80%, at least 85%, at least 90%, at least 95%, at least 96%, at least 97%, at least 98%, at least 99%, or 100% of an exemplary UGI sequence provided herein. In some embodiments, a UGI comprises an amino acid sequence homologous to the amino acid sequence set forth herein below, or an amino acid sequence homologous to a fragment of the amino acid sequence set forth herein below. In some embodiments, proteins comprising UGI or fragments of UGI or homologs of UGI or UGI fragments are referred to as “UGI variants.” A UGI variant shares homology to UGI, or a fragment thereof. For example, a UGI variant is at least 70% identical, at least 75% identical, at least 80% identical, at least 85% identical, at least 90% identical, at least 95% identical, at least 96% identical, at least 97% identical, at least 98% identical, at least 99% identical, at least 99.5% identical, or at least 99.9% identical to a wild type UGI or a UGI as set forth herein. In some embodiments, the UGI variant comprises a fragment of UGI, such that the fragment is at least 70% identical, at least 80% identical, at least 90% identical, at least 95% identical, at least 96% identical, at least 97% identical, at least 98% identical, at least 99% identical, at least 99.5% identical, or at least 99.9% to the corresponding fragment of wild-type UGI or a UGI as set forth below. In some embodiments, the UGI comprises the following amino acid sequence:

[0436] >splP14739IUNGI_BPPB2 Uracil-DNA glycosylase inhibitor

MTNLSDIIEKETGKQLVIQESILMLPEEVEEVIGNKPESDILVHTAYDES
TDENVMLLT SD APE YKPW ALVIQDSNGENKIKML

[0437] The term “vector” refers to a means of introducing a nucleic acid sequence into a cell, resulting in a transformed cell. Vectors include plasmids, transposons, phages, viruses, liposomes, and episome. “Expression vectors” are nucleic acid sequences comprising the nucleotide sequence to be expressed in the recipient cell. Expression vectors may include additional nucleic acid sequences to promote and/or facilitate the expression of the of the introduced sequence such as start, stop, enhancer, promoter, and secretion sequences.

[0438] By “zeta chain of T cell receptor associated protein kinase 70 (ZAP70) polypeptide” is meant a protein having at least about 85% amino acid sequence identity to NCBI Accession No. AAH53878.1 and having kinase activity. An exemplary amino acid sequence is provided below.

[0439] >AAH53878.1 Zeta-chain (TCR) associated protein kinase 70 kDa [Homo sapiens]

MPDPAAHLPFFYGSISRAEAEEHLKLAGMADGLFLLRQCLRSLGGYVLSL
VHDVRFHHFPIERQLNGTYAIAGGKAHCGPAELCEFYSRDPDGLPCNLRK
PCNRPSGLEPQPGVFDCLRDAMVRDYVRQTWKLEGEALEQAIISQAPQVE
KLIATTAHERMPWYHSSLTREEAERKLYSGAQTDGKFLLRPRKEQGTYAL
SLIYGKTVYHYLISQDKAGKYCIPEGTKFDTLWQLVEYLKLKADGLIYCL
KEACPNSSASNASGAAAPTLPAHPSTLTHPQRRIDTLNSDGYTPEPARIT
SPDKPRPMPMDTSVYESPYSDPEELKDKKLFLKRDNLLIADIELGCGNFG
SVRQGVYRMRKKQIDVAIKVLKQGTEKADTEEMMREAQIMHQLDNPYIVR
LIGVCQAEALMLVMEMAGGGPLHKFLVGKREEIPVSNVAELLHQVSMGMK
YLEEKNFVHRDLAARNVLLVNRHYAKISDFGLSKALGADDSYYTARSAGK
WPLKWYAPECINFRKFSSRSDVWSYGVTMWEALSYGQKPYKKMKGPEVMA
FIEQGKRMECPPECPPELYALMSDCWIYKWEDRPDFLTVEQRMRACYYSL
ASKVEGPPGSTQKAEAACA

[0440] By “zeta chain of T cell receptor associated protein kinase 70 (ZAP70) polynucleotide” is meant a nucleic acid encoding a ZAP70 polypeptide. The ZAP70 gene encodes a tyrosine kinase that is involved in T cell development and lymphocyte activation. Absence of functional ZAP10 can lead to a severe combined immunodeficiency characterized by the lack of CD8+ T cells. An exemplary ZAP70 nucleic acid sequence is provided below.

[0441] >BC053878.1 Homo sapiens zeta-chain (TCR) associated protein kinase 70 kDa, mRNA (cDNA clone MGC:61743 IMAGE:5757161), complete cds

GCTTGCCGGAGCTCAGCAGACACCAGGCCTTCCGGGCAGGCCTGGCCCAC
CGTGGGCCTCAGAGCTGCTGCTGGGGCATTCAGAACCGGCTCTCCATTGG
CATTGGGACCAGAGACCCCGCAAGTGGCCTGTTTGCCTGGACATCCACCT
GTACGTCCCCAGGTTTCGGGAGGCCCAGGGGCGATGCCAGACCCCGCGGC
GCACCTGCCCTTCTTCTACGGCAGCATCTCGCGTGCCGAGGCCGAGGAGC
ACCTGAAGCTGGCGGGCATGGCGGACGGGCTCTTCCTGCTGCGCCAGTGC
CTGCGCTCGCTGGGCGGCTATGTGCTGTCGCTCGTGCACGATGTGCGCTT
CCACCACTTTCCCATCGAGCGCCAGCTCAACGGCACCTACGCCATTGCCG
GCGGCAAAGCGCACTGTGGACCGGCAGAGCTCTGCGAGTTCTACTCGCGC
GACCCCGACGGGCTGCCCTGCAACCTGCGCAAGCCGTGCAACCGGCCGTC
GGGCCTCGAGCCGCAGCCGGGGGTCTTCGACTGCCTGCGAGACGCCATGG
TGCGTGACTACGTGCGCCAGACGTGGAAGCTGGAGGGCGAGGCCCTGGAG
CAGGCCATCATCAGCCAGGCCCCGCAGGTGGAGAAGCTCATTGCTACGAC
GGCCCACGAGCGGATGCCCTGGTACCACAGCAGCCTGACGCGTGAGGAGG
CCGAGCGCAAACTTTACTCTGGGGCGCAGACCGACGGCAAGTTCCTGCTG
AGGCCGCGGAAGGAGCAGGGCACATACGCCCTGTCCCTCATCTATGGGAA
GACGGTGTACCACTACCTCATCAGCCAAGACAAGGCGGGCAAGTACTGCA
TTCCCGAGGGCACCAAGTTTGACACGCTCTGGCAGCTGGTGGAGTATCTG
AAGCTGAAGGCGGACGGGCTCATCTACTGCCTGAAGGAGGCCTGCCCCAA
CAGCAGTGCCAGCAACGCCTCAGGGGCTGCTGCTCCCACACTCCCAGCCC
ACCCATCCACGTTGACTCATCCTCAGAGACGAATCGACACCCTCAACTCA
GATGGATACACCCCTGAGCCAGCACGCATAACGTCCCCAGACAAACCGCG
GCCGATGCCCATGGACACGAGCGTGTATGAGAGCCCCTACAGCGACCCAG
AGGAGCTCAAGGACAAGAAGCTCTTCCTGAAGCGCGATAACCTCCTCATA
GCTGACATTGAACTTGGCTGCGGCAACTTTGGCTCAGTGCGCCAGGGCGT
GTACCGCATGCGCAAGAAGCAGATCGACGTGGCCATCAAGGTGCTGAAGC
AGGGCACGGAGAAGGCAGACACGGAAGAGATGATGCGCGAGGCGCAGATC
ATGCACCAGCTGGACAACCCCTACATCGTGCGGCTCATTGGCGTCTGCCA
GGCCGAGGCCCTCATGCTGGTCATGGAGATGGCTGGGGGCGGGCCGCTGC
ACAAGTTCCTGGTCGGCAAGAGGGAGGAGATCCCTGTGAGCAATGTGGCC
GAGCTGCTGCACCAGGTGTCCATGGGGATGAAGTACCTGGAGGAGAAGAA
CTTTGTGCACCGTGACCTGGCGGCCCGCAACGTCCTGCTGGTTAACCGGC
ACTACGCCAAGATCAGCGACTTTGGCCTCTCCAAAGCACTGGGTGCCGAC
GACAGCTACTACACTGCCCGCTCAGCAGGGAAGTGGCCGCTCAAGTGGTA
CGCACCCGAATGCATCAACTTCCGCAAGTTCTCCAGCCGCAGCGATGTCT
GGAGCTATGGGGTCACCATGTGGGAGGCCTTGTCCTACGGCCAGAAGCCC
TACAAGAAGATGAAAGGGCCGGAGGTCATGGCCTTCATCGAGCAGGGCAA
GCGGATGGAATGCCCACCAGAGTGTCCACCCGAACTGTACGCACTCATGA
GTGACTGCTGGATCTACAAGTGGGAGGATCGCCCCGACTTCCTGACCGTG
GAGCAGCGCATGCGAGCCTGTTACTACAGCCTGGCCAGCAAGGTGGAAGG
GCCCCCAGGCAGCACACAGAAGGCTGAGGCTGCCTGTGCCTGAGCTCCCG
CTGCCCAGGGGAGCCCTCCACACCGGCTCTTCCCCACCCTCAGCCCCACC
CCAGGTCCTGCAGTCTGGCTGAGCCCTGCTTGGTTGTCTCCACACACAGC
TGGGCTGTGGTAGGGGGTGTCTCAGGCCACACCGGCCTTGCATTGCCTGC
CTGGCCCCCTGTCCTCTCTGGCTGGGGAGCAGGGAGGTCCGGGAGGGTGC
GGCTGTGCAGCCTGTCCTGGGCTGGTGGCTCCCGGAGGGCCCTGAGCTGA
GGGCATTGCTTACACGGATGCCTTCCCCTGGGCCCTGACATTGGAGCCTG
GGCATCCTCAGGTGGTCAGGCGTAGATCACCAGAATAAACCCAGCTTCCC
TCTTGAAAAAAAAAAAAAAAAAAAAAAAAAAAAAAAAAAAAAAAAAAAAA
AAAAAAAAAAAAAAAAAA

[0442] Unless specifically stated or obvious from context, as used herein, the term “or” is understood to be inclusive. Unless specifically stated or obvious from context, as used herein, the terms “a”, “an”, and “the” are understood to be singular or plural.

[0443] Unless specifically stated or obvious from context, as used herein, the term “about” is understood as within a range of normal tolerance in the art, for example within 2 standard deviations of the mean. About can be understood as within 10%, 9%, 8%, 7%, 6%, 5%, 4%, 3%, 2%, 1%, 0.5%, 0.1%, 0.05%, or 0.01% of the stated value. Unless otherwise clear from context, all numerical values provided herein are modified by the term about.

[0444] Ranges provided herein are understood to be shorthand for all the values within the range. For example, a range of 1 to 50 is understood to include any number, combination of numbers, or sub-range from the group consisting 1, 2, 3, 4, 5, 6, 7, 8, 9, 10, 11, 12, 13, 14, 15, 16, 17, 18, 19, 20, 21, 22, 23, 24, 25, 26, 27, 28, 29, 30, 31, 32, 33, 34, 35, 36, 37, 38, 39, 40, 41, 42, 43, 44, 45, 46, 47, 48, 49, or 50.

[0445] The recitation of a listing of chemical groups in any definition of a variable herein includes definitions of that variable as any single group or combination of listed groups. The recitation of an embodiment for a variable or aspect herein includes that embodiment as any single embodiment or in combination with any other embodiments or portions thereof.

[0446] Any compositions or methods provided herein can be combined with one or more of any of the other compositions and methods provided herein.

### BRIEF DESCRIPTION OF THE DRAWINGS

[0447] FIGS. 1A-1B are illustrations of three proteins that impact T cell function. FIG. 1A is an illustration of the TRAC protein, which is a key component in graft versus host disease. FIG. 1B is an illustration of the B2M protein, a component of the MHC class 1 antigen presenting complex present on nucleated cells that can be recognized by a host's CD8+ T cells. FIG. 1C is an illustration of T cell signaling that leads to expression of the PDCD1 gene, and the resulting PD-1 protein acts to inhibit the T cell signaling.

[0448] FIG. 2 is a graph of the percentage of cells with knocked down expression of target genes after base editing. “EP” denotes electroporation.

[0449] FIG. 3 is a graph of the percentages of the observed types of genetic modification in untransduced cells or in cells transduced with a BE4 base editing system or a Cas9 nuclease.

[0450] FIG. 4 is a graph depicting target nucleotide modification percentage as measured by percentage of cells that are negative for target protein expression as determined by flow cytometry (FC) in cells transduced with BE4 and sgRNAs directing BE4 to splice site acceptors (SA) or donors (SD) or that generate a STOP codon. Control cells were mock electroporated (EP).

[0451] FIG. 5 is a diagram of the BE4 system disrupting splice site acceptors (SA), splice donors (SD), or generate STOP codons.

[0452] FIG. 6 is a chart summarizing off-target binding sites of sgRNAs employed to disrupt target genes.

[0453] FIG. 7 is a graph summarizing flow cytometry (FC) data of the percentage of cells edited with BE4 or Cas9 that exhibit reduced protein expression. Cells were either gated to B2M or CD3, the latter being a proxy for TRAC expression.

[0454] FIG. 8A is a scatter plot of FACS data of unedited control cells. FIG. 8B is a scatter plot of FACS data of cells that have been edited at the B2M, TRAC, and PD1 loci.

[0455] FIG. 9 is a graph illustrating the effectiveness of the base editing techniques described herein to modify specific genes that can negatively impact CAR-T immunotherapy.

[0456] FIG. 10 is a diagram depicting a droplet digital PCR (ddPCR) protocol to detect and quantify gene modifications and translocations.

[0457] FIG. 11 presents two graphs showing the data generated from next generation sequencing (NGS) analysis or ddPCR of cells edited using either the BE4 system or the Cas9 system.

[0458] FIG. 12 is a schematic diagram that illustrates the role Cbl-b plays in suppressing T cell activation.

[0459] FIG. 13 is a graph depicting the efficiency of Cbl-b knockdown by disruption of splice sites. SA=Splice Acceptor; SD=Splice Donor; STOP—generated STOP codon; 2° Only=secondary antibody only; C373 refers to a loss of function variant (C373R); RL1-A::APC-A=laser; ICS=intracellular staining.

[0460] FIG. 14 is a graph illustrating the rate of Cas12b-mediated indels in the GRIN2B and DNMT1 genes in T cells. EP denotes electroporation.

[0461] FIG. 15 is a graph summarizing fluorescence assisted cell sorting (FACS) data of cells transduced via electroporation (EP) with bvCas12b and guide RNAs specific for TRAC, GRIN2B, and DNMT1 and gated for CD3.

[0462] FIG. 16 is a scatter plot of fluorescence assisted cell sorting data of cells transduced CAR-P2A-mCherry lentivirus demonstrating CAR expression.

[0463] FIG. 17 is a scatter plot of fluorescence assisted cell sorting data demonstrating CAR expression in cells transduced with a poly(1,8-octanediol citrate) (POC) lentiviral vector.

[0464] FIG. 18 is graph showing that BE4 produced efficient, durable gene knockout with high product purity.

[0465] FIG. 19A is a representative FACS analysis showing loss of surface expression of a protein due to gene knockout by BE4 or spCas9. FIG. 19B is a graph show that gene knockout by BE4 or spCas9 produces loss of B2M surface expression.

[0466] FIG. 20 is a schematic depicting the locations of B2M, TRAC, and PD-1 target sites. Translocations can be detected when B2M, TRAC, and PD-1 sequences recombine.

[0467] FIG. 21 is a graph showing that multiplexed base editing does not significantly impair cell expansion.

[0468] FIG. 22 is a graph showing that BE4 generated triple-edited T cells with similar on-target editing efficiency and cellular phenotype as spCas9.

[0469] FIG. 23 depicts flow cytometry analysis showing the generation of triple-edited CD3⁻, B2M⁻, PD1⁻ T cells.

[0470] FIG. 24 depicts flow cytometry analysis showing the CAR expression in BE4 and Cas9 edited cells.

[0471] FIG. 25 is a graph showing CAR-T cell killing or antigen positive cells.

[0472] FIG. 26 are graphs showing that Cas12b and BE4 can be paired for efficient multiplex editing in T cells.

[0473] FIG. 27 is a graph showing that Cas12b can direct insertion of a chimeric antigen receptor (CAR) into a locus by introducing into a cell a double-stranded DNA template encoding the CAR in the presence of a Cas12 nuclease and an sgRNA targeting the locus.

[0474] FIGS. 28A and 28B are graphs showing protein knockdown (% Negative) using base editing targeting the genes indicated in the figures as determined by flow cytometry, gated with respect to an unedited control. The figures represent results from replicate experiments. Bars for each set of conditions are presented in the order (from left to right) as listed in the key (top to bottom). The identity of each bar in the grouping of eight bar graphs correspond to, from left to right, CD3, CD7, CD52, PD1, B2M CD2, HLADR (CIITA surrogate), and CD5.

### DETAILED DESCRIPTION OF THE INVENTION

[0475] The present invention features genetically modified immune cells having enhanced anti-neoplasia activity, resistance to immune suppression, and decreased risk of eliciting a graft versus host reaction or a host versus graft reaction, or a combination thereof. The present invention also features methods for producing and using these modified immune cells (e.g., immune effector cells, such as T cells).

[0476] In one embodiment, a subject having or having a propensity to develop graft versus host disease (GVHD) is administered a CAR-T cell that lacks or has reduced levels of functional TRAC. In one embodiment, a subject having or having a propensity to develop host versus graft disease (HVGD) is administered a CAR-T cell that lacks or has reduced levels of functional beta2 microglobulin (B2M).

[0477] The modification of immune effector cells to express chimeric antigen receptors and to knockout or knockdown specific genes to diminish the negative impact that their expression can have on immune cell function is accomplished using a base editor system comprising a cytidine deaminase or adenosine deaminase as described herein.

[0478] Autologous, patient-derived chimeric antigen receptor-T cell (CAR-T) therapies have demonstrated remarkable efficacy in treating some hematologic cancers. While these products have led to significant clinical benefit for patients, the need to generate individualized therapies creates substantial manufacturing challenges and financial burdens. Allogeneic CAR-T therapies were developed as a potential solution to these challenges, having similar clinical efficacy profiles to autologous products while treating many patients with cells derived from a single healthy donor, thereby substantially reducing cost of goods and lot-to-lot variability.

[0479] Most first-generation allogeneic CAR-Ts use nucleases to introduce two or more targeted genomic DNA double strand breaks (DSBs) in a target T cell population, relying on error-prone DNA repair to generate mutations that knock out target genes in a semi-stochastic manner. Such nuclease-based gene knockout strategies aim to reduce the risk of graft-versus-host-disease and host rejection of CAR-Ts. However, the simultaneous induction of multiple DSBs results in a final cell product containing large-scale genomic rearrangements such as balanced and unbalanced translocations, and a relatively high abundance of local rearrangements including inversions and large deletions. Furthermore, as increasing numbers of simultaneous genetic modifications are made by induced DSBs, considerable genotoxicity is observed in the treated cell population. This has the potential to significantly reduce the cell expansion potential from each manufacturing run, thereby decreasing the number of patients that can be treated per healthy donor.

[0480] Base editors (BEs) are a class of emerging gene editing reagents that enable highly efficient, user-defined modification of target genomic DNA without the creation of DSBs. Here, an alternative means of producing allogeneic CAR-T cells is proposed by using base editing technology to reduce or eliminate detectable genomic rearrangements while also improving cell expansion. As shown herein, in contrast to a nuclease-only editing strategy, concurrent modification of multiple gene loci, for example, three, four, five, six, seven, eight, night, ten, or more genetic loci by base editing produces highly efficient gene knockouts with no detectable translocation events.

[0481] In some embodiments, at least 1, 2, 3, 4, 5, 6, 7, 8, or more genes or regulatory elements thereof are modified in an immune cell with the base editing compositions and methods provided herein. In some embodiments, the at least 1, 2, 3, 4, 5, 6, 7, 8, or more genes or regulatory elements thereof comprise one or more genes selected from CD3e, CD3 delta, CD3 gamma, TRAC, TRBC1, and TRBC2. In some embodiments, the at least 1, 2, 3, 4, 5, 6, 7, 8, or more genes or regulatory elements thereof comprise one or more genes selected from CD3e, CD3 delta, CD3 gamma, TRAC, TRBC1, and TRBC2, CD7, and CD52. In some embodiments, the at least 1, 2, 3, 4, 5, 6, 7, 8, or more genes or regulatory elements thereof comprise one or more genes selected from CD3e, CD3 delta, CD3 gamma, TRAC, TRBC1, TRBC2, CD2, CD5, CD7, and CD52. In some embodiments, the at least 1, 2, 3, 4, 5, 6, 7, 8, or more genes or regulatory elements thereof comprise one or more genes selected from TRAC, CD7, and CD52. In some embodiments, the at least 1, 2, 3, 4, 5, 6, 7, 8, or more genes or regulatory elements thereof comprise one or more genes selected from TRAC, CD2, CD5, CD7, and CD52. In some embodiments, the at least 1, 2, 3, 4, 5, 6, 7, 8, or more genes or regulatory elements thereof comprise one or more genes selected from CD2, CD3 epsilon, CD3 gamma, CD3 delta, CD4, CD5, CD7, CD30, CD33, CD52, CD70, and CIITA. In some embodiments, the at least 1, 2, 3, 4, 5, 6, 7, 8, or more genes or regulatory elements thereof are selected from CD2, CD3 epsilon, CD3 gamma, CD3 delta, CD4, CD5, CD7, CD30, CD33, CD52, CD70, and CIITA. In some embodiments, the at least 1, 2, 3, 4, 5, 6, 7, 8, or more genes or regulatory elements thereof comprise one or more genes selected from CD2, CD3 epsilon, CD3 gamma, CD3 delta, CD4, CD5, CD7, CD30, CD33, CD52, CD70, and CIITA. In some embodiments, the at least 1, 2, 3, 4, 5, 6, 7, 8, or more genes or regulatory elements thereof are selected from ACAT1, ACLY, ADORA2A, AXL, B2M, BATF, BCL2L11, BTLA, CAMK2D, cAMP, CASP8, Cblb, CCR5, CD2, CD3D, CD3E, CD3G, CD4, CD5, CD7, CD8A, CD33, CD38, CD52, CD70, CD82, CD86, CD96, CD123, CD160, CD244, CD276, CDK8, CDKN1B, Chi311, CIITA, CISH, CSF2CSK, CTLA-4, CUL3, Cyp11a1, DCK, DGKA, DGKZ, DHX37, ELOB (TCEB2), ENTPD1 (CD39), FADD, FAS, GATA3, IL6, IL6R, IL10, IL10RA, IRF4, IRF8, JUNB, Lag3, LAIR-1 (CD305), LDHA, LIF, LYN, MAP4K4, MAPK14, MCJ, MEF2D, MGAT5, NR4A1, NR4A2, NR4A3, NT5E (CD73), ODC1, OTULINL (FAM105A), PAG1, PDCD1, PDIA3, PHD1 (EGLN2), PHD2 (EGLN1), PHD3 (EGLN3), PIK3CD, PIKFYVE, PPARa, PPARd, PRDMI1, PRKACA, PTEN, PTPN2, PTPN6, PTPN11, PVRIG (CD112R), RASA2, RFXANK, SELPG/PSGL1, SIGLEC15, SLA, SLAMF7, SOCS1, Spry1, Spry2, STK4, SUV39, H1TET2, TGFbRII, TIGIT, Tim-3, TMEM222, TNFAIP3, TNFRSF8 (CD30), TNFRSF10B, TOX, TOX2, TRAC, TRBC1, TRBC2, UBASH3A, VHL, VISTA, XBP1, YAP1, and ZC3H12A. In some embodiments, at least 8 genes selected from CD2, CD3 epsilon, CD3 gamma, CD3 delta, CD4, CD5, CD7, CD30, CD33, CD52, CD70, and CIITA or regulatory elements thereof are modified with the base editing compositions and methods provided herein.

[0482] In one aspect, provided herein is a universal CAR-T cell. In some embodiments, the CAR-T cell described herein is an allogeneic cell. In some embodiments, the universal CAR-T cell is an allogeneic T cell that can be used to express a desired CAR, and can be universally applicable, irrespective of the donor and the recipient's immunogenic compatibility. An allogenic immune cell may be derived from one or more donors. In certain embodiments, the allogenic immune cell is derived from a single human donor. For example, the allogenic T cell may be derived from PBMCs of a single healthy human donor. In certain embodiments, the allogenic immune cell is derived from multiple human donors. In some embodiments, an universal CAR-T cell may be generated, as described herein by using gene modification to introduce concurrent edits at multiple gene loci, for example, three, four, five, six, seven, eight, nine, ten or more genetic loci. A modification, or concurrent modifications as described herein may be a genetic editing, such as a base editing, generated by a base editor. The base editor may be a C base editor or A base editor. As is discussed herein, base editing may be used to achieve a gene disruption, such that the gene is not expressed. A modification by base editing may be used to achieve a reduction in gene expression. In some embodiments base editor may be used to introduce a genetic modification such that the edited gene does not generate a structurally or functionally viable protein product. In some embodiments, a modification, such as the concurrent modifications described herein may comprise a genetic editing, such as base editing, such that the expression or functionality of the gene product is altered in any way. For example, the expression of the gene product may be enhanced or upregulated as compared to baseline expression levels. In some embodiments the activity or functionality of the gene product may be upregulated as a result of the base editing, or multiple base editing events acting in concert.

[0483] In some embodiments, generation of universal CAR-T cell may be advantageous over autologous T cell (CAR-T), which may be difficult to generate for an urgent use. Allogeneic approaches are preferred over autologous cell preparation for a number of situations related to uncertainty of engineering autologous T cells to express a CAR and finally achieving the desired cellular products for a transplant at the time of medical emergency. However, for allogeneic T cells, or “off-the-shelf” T cells, it is important to carefully negotiate the host's reactivity to the CAR-T cells (HVGD) as well as the allogeneic T cell's potential hostility towards a host cell (GVHD). Given the scenario, base editing can be successfully used to generate multiple simultaneous gene editing events, such that (a) it is possible to generate a platform cell type that is devoid of or expresses low amounts of an endogenous T cell receptor, for example, a TCR alpha chain (such a via base editing of TRAC), or a TCR beta chain (such a through base editing of TRBC1/TRBC2); (b) it is possible to reduce or down regulate expression of antigens that may be incompatible to a host tissue system and vice versa.

[0484] In some embodiments, the methods described herein can be used to generate an autologous T cell expressing a CAR-T.

[0485] In some embodiment, multiple base editing events can be accomplished in a single electroporation event, thereby reducing electroporation event associated toxicity. Any known methods for incorporation of exogenous genetic material into a cell may be used to replace electroporation, and such methods known in the art are hereby contemplated for use in any of the methods described herein.

[0486] In one experiment, the base editor BE4 demonstrated high efficiency multiplex base editing of three cell surface targets in T cells (TRAC, B2M, and PD-1), knocking out gene expression by 95%, 95% and 88%, respectively, in a single electroporation to generate cell populations with high percentages of cells with reduced protein expression of B2M and CD3. Editing each of these genes may be useful in the creation of CAR-T cell therapies with improved therapeutic properties. Each of the genes was silenced by a single targeted base change (C to T) without the creation of double strand breaks. As a result, the BE4-treated cells also did not show any measurable translocations (large-scale genomic rearrangements), whereas cells receiving the same three edits with a nuclease did show detectable genomic rearrangements.

[0487] Thus, coupling nuclease-based knockout of the TRAC gene with simultaneous BE-mediated knockout of two additional genes yields a homogeneous allogeneic T cell population with minimal genomic rearrangements. In some embodiments, the simultaneous BE mediated knockout or knockdown, or a combination thereof, may be performed in 2 additional genes, or 3 additional genes, or 4 additional genes, or 5 additional genes, or 6 additional genes, or 7 additional genes, or 8 additional genes, or 9 additional genes, or 10 additional genes, or 11 additional genes, or 12 additional genes, or more, to yield a homogenous allogeneic T cell population with minimal genomic rearrangements, and enabling targeted insertion of a CAR transgene at the TRAC locus. In some embodiments, the disclosure provides three simultaneous gene knockouts or knockdowns, by base editing along with a CAR transgene at the TRAC locus. In some embodiments, the disclosure provides four simultaneous gene knockouts or knockdowns, by base editing along with a CAR transgene at the TRAC locus. In some embodiments, the disclosure provides five simultaneous gene knockouts or knockdowns, by base editing along with a CAR transgene at the TRAC locus. In some embodiments, the disclosure provides six simultaneous gene knockouts or knockdowns, by base editing along with a CAR transgene at the TRAC locus. In some embodiments, the disclosure provides seven simultaneous gene knockouts or knockdowns, by base editing along with a CAR transgene at the TRAC locus. In some embodiments, the disclosure provides eight simultaneous gene knockouts or knockdowns, by base editing along with a CAR transgene at the TRAC locus. In some embodiments, the disclosure provides nine simultaneous gene knockouts or knockdowns, by base editing along with a CAR transgene at the TRAC locus. In some embodiments, the disclosure provides ten simultaneous gene knockouts or knockdowns, by base editing along with a CAR transgene at the TRAC locus. In some embodiments, the disclosure provides eleven simultaneous gene knockouts or knockdowns, by base editing along with a CAR transgene at the TRAC locus. In some embodiments, the disclosure provides twelve simultaneous gene knockouts or knockdowns, by base editing along with a CAR transgene at the TRAC locus. In some embodiments, the disclosure provides thirteen simultaneous gene knockouts or knockdowns, by base editing along with a CAR transgene at the TRAC locus. In some embodiments, the disclosure provides fourteen simultaneous gene knockouts or knockdowns, by base editing along with a CAR transgene at the TRAC locus. In some embodiments, the disclosure provides fifteen simultaneous gene knockouts or knockdowns, by base editing along with a CAR transgene at the TRAC locus. In some embodiments, the disclosure provides sixteen simultaneous gene knockouts or knockdowns, by base editing along with a CAR transgene at the TRAC locus. In some embodiments, the disclosure provides seventeen simultaneous gene knockouts or knockdowns, by base editing along with a CAR transgene at the TRAC locus. In some embodiments, the disclosure provides eighteen simultaneous gene knockouts or knockdowns, by base editing along with a CAR transgene at the TRAC locus. In some embodiments, the disclosure provides nineteen simultaneous gene knockouts or knockdowns, by base editing along with a CAR transgene at the TRAC locus. In some embodiments, the disclosure provides twenty simultaneous gene knockouts or knockdowns, by base editing along with a CAR transgene at the TRAC locus. Taken together, this demonstrates that base editing alone or in combination with a single nuclease knockout and CAR insertion is a useful strategy for generating allogeneic T cells with minimal genomic rearrangements compared to nuclease-alone approaches. This method addresses known limitations of multiplex-edited T cell products and are a promising development towards the next generation of precision cell based therapies.

### Chimeric Antigen Receptor and CAR-T Cells

[0488] The invention provides immune cells modified using nucleobase editors described herein that express chimeric antigen receptors. Modification of immune cells to express a chimeric antigen receptor can enhance an immune cell's immunoreactive activity, wherein the chimeric antigen receptor has an affinity for an epitope on an antigen, wherein the antigen is associated with an altered fitness of an organism. For example, the chimeric antigen receptor can have an affinity for an epitope on a protein expressed in a neoplastic cell. Because the CAR-T cells can act independently of major histocompatibility complex (MHC), activated CAR-T cells can kill the neoplastic cell expressing the antigen. The direct action of the CAR-T cell evades neoplastic cell defensive mechanisms that have evolved in response to MHC presentation of antigens to immune cells.

[0489] In some embodiments, the invention provides immune effector cells that express chimeric antigen receptors that target B cells involved in an autoimmune response (e.g., B cells of a subject that express antibodies generated against the subject's own tissues).

[0490] Some embodiments comprise autologous immune cell immunotherapy, wherein immune cells are obtained from a subject having a disease or altered fitness characterized by cancerous or otherwise altered cells expressing a surface marker. The obtained immune cells are genetically modified to express a chimeric antigen receptor and are effectively redirected against specific antigens. Thus, in some embodiments, immune cells are obtained from a subject in need of CAR-T immunotherapy. In some embodiments, these autologous immune cells are cultured and modified shortly after they are obtained from the subject. In other embodiments, the autologous cells are obtained and then stored for future use. This practice may be advisable for individuals who may be undergoing parallel treatment that will diminish immune cell counts in the future. In allogeneic immune cell immunotherapy, immune cells can be obtained from a donor other than the subject who will be receiving treatment. The immune cells, after modification to express a chimeric antigen receptor, are administered to a subject for treating a neoplasia. In some embodiments, immune cells to be modified to express a chimeric antigen receptor can be obtained from pre-existing stock cultures of immune cells.

[0491] Immune cells and/or immune effector cells can be isolated or purified from a sample collected from a subject or a donor using standard techniques known in the art. For example, immune effector cells can be isolated or purified from a whole blood sample by lysing red blood cells and removing peripheral mononuclear blood cells by centrifugation. The immune effector cells can be further isolated or purified using a selective purification method that isolates the immune effector cells based on cell-specific markers such as CD25, CD3, CD4, CD8, CD28, CD45RA, or CD45RO. In one embodiment, CD25+ is used as a marker to select regulatory T cells. In another embodiment, the invention provides T cells that have targeted gene knockouts at the TCR constant region (TRAC), which is responsible for TCRαβ surface expression. TCR alphabeta-deficient CAR T cells are compatible with allogeneic immunotherapy (Qasim et al., Sci. Transl. Med. 9, eaaj2013 (2017); Valton et al., Mol Ther. 2015 September; 23(9): 1507-1518). If desired, residual TCRalphabeta T cells are removed using CliniMACS magnetic bead depletion to minimize the risk of GVHD. In another embodiment, the invention provides donor T cells selected ex vivo to recognize minor histocompatibility antigens expressed on recipient hematopoietic cells, thereby minimizing the risk of graft-versus-host disease (GVHD), which is the main cause of morbidity and mortality after transplantation (Warren et al., Blood 2010; 115(19):3869-3878). Another technique for isolating or purifying immune effector cells is flow cytometry. In fluorescence activated cell sorting a fluorescently labelled antibody with affinity for an immune effector cell marker is used to label immune effector cells in a sample. A gating strategy appropriate for the cells expressing the marker is used to segregate the cells. For example, T lymphocytes can be separated from other cells in a sample by using, for example, a fluorescently labeled antibody specific for an immune effector cell marker (e.g., CD4, CD8, CD28, CD45) and corresponding gating strategy. In one embodiment, a CD45 gating strategy is employed. In some embodiments, a gating strategy for other markers specific to an immune effector cell is employed instead of, or in combination with, the CD45 gating strategy.

[0492] The immune effector cells contemplated in the invention are effector T cells. In some embodiments, the effector T cell is a naïve CD8⁺ T cell, a cytotoxic T cell, or a regulatory T (Treg) cell. In some embodiments, the effector T cells are thymocytes, immature T lymphocytes, mature T lymphocytes, resting T lymphocytes, or activated T lymphocytes. In some embodiments the immune effector cell is a CD4⁺ CD8⁺ T cell or a CD4⁻ CD8⁻ T cell. In some embodiments the immune effector cell is a T helper cell. In some embodiments the T helper cell is a T helper 1 (Th1), a T helper 2 (Th2) cell, or a helper T cell expressing CD4 (CD4+ T cell). In some embodiments, the immune effector cell is any other subset of T cells. The modified immune effector cell may express, in addition to the chimeric antigen receptor, an exogenous cytokine, a different chimeric receptor, or any other agent that would enhance immune effector cell signaling or function. For example, coexpression of the chimeric antigen receptor and a cytokine may enhance the CAR-T cell's ability to lyse a target cell.

[0493] Chimeric antigen receptors as contemplated in the present invention comprise an extracellular binding domain, a transmembrane domain, and an intracellular domain. Binding of an antigen to the extracellular binding domain can activate the CAR-T cell and generate an effector response, which includes CAR-T cell proliferation, cytokine production, and other processes that lead to the death of the antigen expressing cell. In some embodiments of the present invention, the chimeric antigen receptor further comprises a linker.

[0494] The extracellular binding domain of a chimeric antigen receptor contemplated herein comprises an amino acid sequence of an antibody, or an antigen binding fragment thereof, that has an affinity for a specific antigen. In various embodiments, the CAR specifically binds 5T4. Exemplary anti-5T4 CARs include, without limitation, CART-5T4 (Oxford BioMedica plc) and UCART-5T4 (Cellectis SA).

[0495] In various embodiments, the CAR specifically binds Alpha-fetoprotein. Exemplary anti-Alpha-fetoprotein CARs include, without limitation, ET-1402 (Eureka Therapeutics Inc). In various embodiments, the CAR specifically binds Axl. Exemplary anti-Axl CARs include, without limitation, CCT-301-38 (F1 Oncology Inc). In various embodiments, the CAR specifically binds B7H6. Exemplary anti-B7H6 CARs include, without limitation, CYAD-04 (Celyad SA).

[0496] In various embodiments, the CAR specifically binds BCMA. Exemplary anti-BCMA CARs include, without limitation, ACTR-087+SEA-BCMA (Seattle Genetics Inc), ALLO-715 (Cellectis SA), ARI-0002 (Institut d'Investigacions Biomediques August Pi I Sunyer), bb-2121 (bluebird bio Inc), bb-21217 (bluebird bio Inc), CART-BCMA (University of Pennsylvania), CT-053 (Carsgen Therapeutics Ltd), Descartes-08 (Cartesian Therapeutics), FCARH-143 (Juno Therapeutics Inc), ICTCAR-032 (Innovative Cellular Therapeutics Co Ltd), IM21 CART (Beijing Immunochina Medical Science & Technology Co Ltd), JCARH-125 (Memorial Sloan-Kettering Cancer Center), KITE-585 (Kite Pharma Inc), LCAR-B38M (Nanjing Legend Biotech Co Ltd), LCAR-B4822M (Nanjing Legend Biotech Co Ltd), MCARH-171 (Memorial Sloan-Kettering Cancer Center), P-BCMA-101 (Poseida Therapeutics Inc), P-BCMA-ALLO1 (Poseida Therapeutics Inc), spCART-269 (Shanghai Unicar-Therapy Bio-medicine Technology Co Ltd), and BCMA02/bb2121 (bluebird bio Inc). The polypeptide sequence of the BCMA02/bb2121 CAR is provided below:

MALPVTALLLPLALLLHAARPDIVLTQSPPSLAMSLGKRATISCRASESV
TILGSHLIHWYQQKPGQPPTLLIQLASNVQTGVPARFSGSGSRTDFTLTI
DPVEEDDVAVYYCLQSRTIPRTFGGGTKLEIKGSTSGSGKPGSGEGSTKG
QIQLVQSGPELKKPGETVKISCKASGYTFTDYSINWVKRAPGKGLKWMGW
INTETREPAYAYDFRGRFAFSLETSASTAYLQINNLKYEDTATYFCALDY
SYAMDYWGQGTSVTVSSAAATTTPAPRPPTPAPTIASQPLSLRPEACRPA
AGGAVHTRGLDFACDIYIWAPLAGTCGVLLLSLVITLYCKRGRKKLLYIF
KQPFMRPVQTTQEEDGCSCRFPEEEEGGCELRVKFSRSADAPAYQQGQNQ
LYNELNLGRREEYDVLDKRRGRDPEMGGKPRRKNPQEGLYNELQKDKMAE
AYSEIGMKGERRRGKGHDGLYQGLSTATKDTYDALHMQALPPR

[0497] In various embodiments, the CAR specifically binds CCK2R. Exemplary anti-CCK2R CARs include, without limitation, anti-CCK2R CAR-T adaptor molecule (CAM)+anti-FITC CAR T-cell therapy (cancer), Endocyte/Purdue (Purdue University),

[0498] In various embodiments, the CAR specifically binds a CD antigen. Exemplary anti-CD antigen CARs include, without limitation, VM-802 (ViroMed Co Ltd). In various embodiments, the CAR specifically binds CD123. Exemplary anti-CD123 CARs include, without limitation, MB-102 (Fortress Biotech Inc), RNA CART123 (University of Pennsylvania), SFG-iMC-CD123.zeta (Bellicum Pharmaceuticals Inc), and UCART-123 (Cellectis SA). In various embodiments, the CAR specifically binds CD133. Exemplary anti-CD133 CARs include, without limitation, KD-030 (Nanjing Kaedi Biotech Inc). In various embodiments, the CAR specifically binds CD138. Exemplary anti-CD138 CARs include, without limitation, ATLCAR.CD138 (UNC Lineberger Comprehensive Cancer Center) and CART-138 (Chinese PLA General Hospital). In various embodiments, the CAR specifically binds CD171. Exemplary anti-CD171 CARs include, without limitation, JCAR-023 (Juno Therapeutics Inc). In various embodiments, the CAR specifically binds CD19. Exemplary anti-CD19 CARs include, without limitation, 1928z-41BBL (Memorial Sloan-Kettering Cancer Center), 1928z-E27 (Memorial Sloan-Kettering Cancer Center), 19-28z-T2 (Guangzhou Institutes of Biomedicine and Health), 4G7-CARD (University College London), 4SCAR19 (Shenzhen Geno-Immune Medical Institute), ALLO-501 (Pfizer Inc), ATA-190 (QIMR Berghofer Medical Research Institute), AUTO-1 (University College London), AVA-008 (Avacta Ltd), axicabtagene ciloleucel (Kite Pharma Inc), BG-T19 (Guangzhou Bio-gene Technology Co Ltd), BinD-19 (Shenzhen BinDeBio Ltd.), BPX-401 (Bellicum Pharmaceuticals Inc), CAR19h28TM41BBz (Westmead Institute for Medical Research), C-CAR-011 (Chinese PLA General Hospital), CD19CART (Innovative Cellular Therapeutics Co Ltd), CIK-CAR.CD19 (Formula Pharmaceuticals Inc), CLIC-1901 (Ottawa Hospital Research Institute), CSG-CD19 (Carsgen Therapeutics Ltd), CTL-119 (University of Pennsylvania), CTX-101 (CRISPR Therapeutics AG), DSCAR-01 (Shanghai Hrain Biotechnology), ET-190 (Eureka Therapeutics Inc), FT-819 (Memorial Sloan-Kettering Cancer Center), ICAR-19 (Immune Cell Therapy Inc), IM19 CAR-T (Beijing Immunochina Medical Science & Technology Co Ltd), JCAR-014 (Juno Therapeutics Inc), JWCAR-029 (MingJu Therapeutics (Shanghai) Co., Ltd), KD-C-19 (Nanjing Kaedi Biotech Inc), LinCART19 (iCell Gene Therapeutics), lisocabtagene maraleucel (Juno Therapeutics Inc), MatchCART (Shanghai Hrain Biotechnology), MB-CART19.1 (Shanghai Children's Medical Center), PBCAR-0191 (Precision BioSciences Inc), PCAR-019 (PersonGen Biomedicine (Suzhou) Co Ltd), pCAR-19B (Chongqing Precision Biotech Co Ltd), PZ-01 (Pinze Lifetechnology Co Ltd), RB-1916 (Refuge Biotechnologies Inc), SKLB-083019 (Chengdu Yinhe Biomedical Co Ltd), spCART-19 (Shanghai Unicar-Therapy Bio-medicine Technology Co Ltd), TBI-1501 (Takara Bio Inc), TC-110 (TCR2 Therapeutics Inc), TI-1007 (Timmune Biotech Inc), tisagenlecleucel (Abramson Cancer Center of the University of Pennsylvania), U-CART (Shanghai Bioray Laboratory Inc), UCART-19 (Wugen Inc), UCART-19 (Cellectis SA), vadacabtagene leraleucel (Memorial Sloan-Kettering Cancer Center), XLCART-001 (Nanjing Medical University), and yinnuokati-19 (Shenzhen Innovation Immunotechnology Co Ltd). In various embodiments, the CAR specifically binds CD2. Exemplary anti-CD2 CARs include, without limitation, UCART-2 (Wugen Inc). In various embodiments, the CAR specifically binds CD20. Exemplary anti-CD20 CARs include, without limitation, ACTR-087 (National University of Singapore), ACTR-707 (Unum Therapeutics Inc), CBM-C20.1 (Chinese PLA General Hospital), MB-106 (Fred Hutchinson Cancer Research Center), and MB-CART20.1 (Miltenyi Biotec GmbH).

[0499] In various embodiments, the CAR specifically binds CD22. Exemplary anti-CD22 CARs include, without limitation, anti-CD22 CAR T-cell therapy (B-cell acute lymphoblastic leukemia), University of Pennsylvania (University of Pennsylvania), CD22-CART (Shanghai Unicar-Therapy Bio-medicine Technology Co Ltd), JCAR-018 (Opus Bio Inc), MendCART (Shanghai Hrain Biotechnology), and UCART-22 (Cellectis SA). In various embodiments, the CAR specifically binds CD30. Exemplary anti-CD30 CARs include, without limitation, ATLCAR.CD30 (UNC Lineberger Comprehensive Cancer Center), CBM-C30.1 (Chinese PLA General Hospital), and Hu30-CD28zeta (National Cancer Institute). In various embodiments, the CAR specifically binds CD33. Exemplary anti-CD33 CARs include, without limitation, anti-CD33 CAR gamma delta T-cell therapy (acute myeloid leukemia), TC BioPharm/University College London (University College London), CAR33VH (Opus Bio Inc), CART-33 (Chinese PLA General Hospital), CIK-CAR.CD33 (Formula Pharmaceuticals Inc), UCART-33 (Cellectis SA), and VOR-33 (Columbia University).

[0500] In various embodiments, the CAR specifically binds CD38. Exemplary anti-CD38 CARs include, without limitation, UCART-38 (Cellectis SA). In various embodiments, the CAR specifically binds CD38 A2. Exemplary anti-CD38 A2 CARs include, without limitation, T-007 (TNK Therapeutics Inc). In various embodiments, the CAR specifically binds CD4. Exemplary anti-CD4 CARs include, without limitation, CD4CAR (iCell Gene Therapeutics). In various embodiments, the CAR specifically binds CD44. Exemplary anti-CD44 CARs include, without limitation, CAR-CD44v6 (Istituto Scientifico H San Raffaele). In various embodiments, the CAR specifically binds CD5. Exemplary anti-CD5 CARs include, without limitation, CD5CAR (iCell Gene Therapeutics). In various embodiments, the CAR specifically binds CD7. Exemplary anti-CD7 CARs include, without limitation, CAR-pNK (PersonGen Biomedicine (Suzhou) Co Ltd), and CD7.CAR/28zeta CAR T cells (Baylor College of Medicine), UCART7 (Washington University in St Louis).

[0501] In various embodiments, the CAR specifically binds CDH17. Exemplary anti-CDH17 CARs include, without limitation, ARB-001.T (Arbele Ltd). In various embodiments, the CAR specifically binds CEA. Exemplary anti-CEA CARs include, without limitation, HORC-020 (HumOrigin Inc). In various embodiments, the CAR specifically binds Chimeric TGF-beta receptor (CTBR). Exemplary anti-Chimeric TGF-beta receptor (CTBR) CARs include, without limitation, CAR-CTBR T cells (bluebird bio Inc). In various embodiments, the CAR specifically binds Claudin18.2. Exemplary anti-Claudin18.2 CARs include, without limitation, CAR-CLD18 T-cells (Carsgen Therapeutics Ltd) and KD-022 (Nanjing Kaedi Biotech Inc).

[0502] In various embodiments, the CAR specifically binds CLL1. Exemplary anti-CLL1 CARs include, without limitation, KITE-796 (Kite Pharma Inc). In various embodiments, the CAR specifically binds DLL3. Exemplary anti-DLL3 CARs include, without limitation, AMG-119 (Amgen Inc). In various embodiments, the CAR specifically binds Dual BCMA/TACI (APRIL). Exemplary anti-Dual BCMA/TACI (APRIL) CARs include, without limitation, AUTO-2 (Autolus Therapeutics Limited). In various embodiments, the CAR specifically binds Dual CD19/CD22. Exemplary anti-Dual CD19/CD22 CARs include, without limitation, AUTO-3 (Autolus Therapeutics Limited) and LCAR-L10D (Nanjing Legend Biotech Co Ltd). In various embodiments, the CAR specifically binds CD19. In various embodiments, the CAR specifically binds Dual CLL1/CD33. Exemplary anti-Dual CLL1/CD33 CARs include, without limitation, ICG-136 (iCell Gene Therapeutics). In various embodiments, the CAR specifically binds Dual EpCAM/CD3. Exemplary anti-Dual EpCAM/CD3 CARs include, without limitation, IKT-701 (Icell Kealex Therapeutics). In various embodiments, the CAR specifically binds Dual ErbB/4ab. Exemplary anti-Dual ErbB/4ab CARs include, without limitation, LEU-001 (King's College London). In various embodiments, the CAR specifically binds Dual FAP/CD3. Exemplary anti-Dual FAP/CD3 CARs include, without limitation, IKT-702 (Icell Kealex Therapeutics). In various embodiments, the CAR specifically binds EBV. Exemplary anti-EBV CARs include, without limitation, TT-18 (Tessa Therapeutics Pte Ltd).

[0503] In various embodiments, the CAR specifically binds EGFR. Exemplary anti-EGFR CARs include, without limitation, anti-EGFR CAR T-cell therapy (CBLB MegaTAL, cancer), bluebird bio (bluebird bio Inc), anti-EGFR CAR T-cell therapy expressing CTLA-4 checkpoint inhibitor+PD-1 checkpoint inhibitor mAbs (EGFR-positive advanced solid tumors), Shanghai Cell Therapy Research Institute (Shanghai Cell Therapy Research Institute), CSG-EGFR (Carsgen Therapeutics Ltd), and EGFR-IL12-CART (Pregene (Shenzhen) Biotechnology Co Ltd).

[0504] In various embodiments, the CAR specifically binds EGFRvIII. Exemplary anti-EGFRvIII CARs include, without limitation, KD-035 (Nanjing Kaedi Biotech Inc) and UCART-EgfrVIII (Cellectis SA). In various embodiments, the CAR specifically binds Flt3. Exemplary anti-Flt3 CARs include, without limitation, ALLO-819 (Pfizer Inc) and AMG-553 (Amgen Inc). In various embodiments, the CAR specifically binds Folate receptor. Exemplary anti-Folate receptor CARs include, without limitation, EC17/CAR T (Endocyte Inc). In various embodiments, the CAR specifically binds G250. Exemplary anti-G250 CARs include, without limitation, autologous T-lymphocyte cell therapy (G250-scFV-transduced, renal cell carcinoma), Erasmus Medical Center (Daniel den Hoed Cancer Center).

[0505] In various embodiments, the CAR specifically binds GD2. Exemplary anti-GD2 CARs include, without limitation, 1RG-CART (University College London), 4SCAR-GD2 (Shenzhen Geno-Immune Medical Institute), C7R-GD2.CART cells (Baylor College of Medicine), CMD-501 (Baylor College of Medicine), CSG-GD2 (Carsgen Therapeutics Ltd), GD2-CARTO1 (Bambino Gesu Hospital and Research Institute), GINAKIT cells (Baylor College of Medicine), iC9-GD2-CAR-IL-15 T-cells (UNC Lineberger Comprehensive Cancer Center), and IKT-703 (Icell Kealex Therapeutics). In various embodiments, the CAR specifically binds GD2 and MUC1. Exemplary anti-GD2/MUC1 CARs include, without limitation, PSMA CAR-T (University of Pennsylvania).

[0506] In various embodiments, the CAR specifically binds GPC3. Exemplary anti-GPC3 CARs include, without limitation, ARB-002.T (Arbele Ltd), CSG-GPC3 (Carsgen Therapeutics Ltd), GLYCAR (Baylor College of Medicine), and TT-14 (Tessa Therapeutics Pte Ltd). In various embodiments, the CAR specifically binds Her2. Exemplary anti-Her2 CARs include, without limitation, ACTR-087+trastuzumab (Unum Therapeutics Inc), ACTR-707+trastuzumab (Unum Therapeutics Inc), CIDeCAR (Bellicum Pharmaceuticals Inc), MB-103 (Mustang Bio Inc), RB-H21 (Refuge Biotechnologies Inc), and TT-16 (Baylor College of Medicine). In various embodiments, the CAR specifically binds IL13R. Exemplary anti-IL13R CARs include, without limitation, MB-101 (City of Hope) and YYB-103 (YooYoung Pharmaceuticals Co Ltd). In various embodiments, the CAR specifically binds integrin beta-7. Exemplary anti-integrin beta-7 CARs include, without limitation, MMG49 CAR T-cell therapy (Osaka University). In various embodiments, the CAR specifically binds LC antigen. Exemplary anti-LC antigen CARs include, without limitation, VM-803 (ViroMed Co Ltd) and VM-804 (ViroMed Co Ltd).

[0507] In various embodiments, the CAR specifically binds mesothelin. Exemplary anti-mesothelin CARs include, without limitation, CARMA-hMeso (Johns Hopkins University), CSG-MESO (Carsgen Therapeutics Ltd), iCasp9M28z (Memorial Sloan-Kettering Cancer Center), KD-021 (Nanjing Kaedi Biotech Inc), m-28z-T2 (Guangzhou Institutes of Biomedicine and Health), MesoCART (University of Pennsylvania), meso-CAR-T+PD-78 (MirImmune LLC), RB-M1 (Refuge Biotechnologies Inc), and TC-210 (TCR2 Therapeutics Inc).

[0508] In various embodiments, the CAR specifically binds MUC1. Exemplary anti-MUC1 CARs include, without limitation, anti-MUC1 CAR T-cell therapy+PD-1 knockout T cell therapy (esophageal cancer/NSCLC), Guangzhou Anjie Biomedical Technology/University of Technology Sydney (Guangzhou Anjie Biomedical Technology Co LTD), ICTCAR-043 (Innovative Cellular Therapeutics Co Ltd), ICTCAR-046 (Innovative Cellular Therapeutics Co Ltd), P-MUCIC-101 (Poseida Therapeutics Inc), and TAB-28z (OncoTab Inc). In various embodiments, the CAR specifically binds MUC16. Exemplary anti-MUC16 CARs include, without limitation, 4H1128Z-E27 (Eureka Therapeutics Inc) and JCAR-020 (Memorial Sloan-Kettering Cancer Center).

[0509] In various embodiments, the CAR specifically binds nfP2X7. Exemplary anti-nfP2X7 CARs include, without limitation, BIL-022c (Biosceptre International Ltd). In various embodiments, the CAR specifically binds PSCA. Exemplary anti-PSCA CARs include, without limitation, BPX-601 (Bellicum Pharmaceuticals Inc). In various embodiments, the CAR specifically binds PSMA. CIK-CAR.PSMA (Formula Pharmaceuticals Inc), and P-PSMA-101 (Poseida Therapeutics Inc). In various embodiments, the CAR specifically binds ROR1. Exemplary anti-ROR1 CARs include, without limitation, JCAR-024 (Fred Hutchinson Cancer Research Center). In various embodiments, the CAR specifically binds ROR2. Exemplary anti-ROR2 CARs include, without limitation, CCT-301-59 (F1 Oncology Inc). In various embodiments, the CAR specifically binds SLAMF7. Exemplary anti-SLAMF7 CARs include, without limitation, UCART-CS1 (Cellectis SA). In various embodiments, the CAR specifically binds TRBC1. Exemplary anti-TRBC1 CARs include, without limitation, AUTO-4 (Autolus Therapeutics Limited). In various embodiments, the CAR specifically binds TRBC2. Exemplary anti-TRBC2 CARs include, without limitation, AUTO-5 (Autolus Therapeutics Limited). In various embodiments, the CAR specifically binds TSHR. Exemplary anti-TSHR CARs include, without limitation, ICTCAT-023 (Innovative Cellular Therapeutics Co Ltd). In various embodiments, the CAR specifically binds VEGFR-1. Exemplary anti-VEGFR-1 CARs include, without limitation, SKLB-083017 (Sichuan University).

[0510] In various embodiments, the CAR is AT-101 (AbClon Inc); AU-101, AU-105, and AU-180 (Aurora Biopharma Inc); CARMA-0508 (Carisma Therapeutics); CAR-T (Fate Therapeutics Inc); CAR-T (Cell Design Labs Inc); CM-CX1 (Celdara Medical LLC); CMD-502, CMD-503, and CMD-504 (Baylor College of Medicine); CSG-002 and CSG-005 (Carsgen Therapeutics Ltd); ET-1501, ET-1502, and ET-1504 (Eureka Therapeutics Inc); FT-61314 (Fate Therapeutics Inc); GB-7001 (Shanghai GeneChem Co Ltd); IMA-201 (Immatics Biotechnologies GmbH); IMM-005 and IMM-039 (Immunome Inc); ImmuniCAR (TC BioPharm Ltd); NT-0004 and NT-0009 (BioNTech Cell and Gene Therapies GmbH), OGD-203 (OGD2 Pharma SAS), PMC-005B (PharmAbcine), and TI-7007 (Timmune Biotech Inc).

[0511] In some embodiments the chimeric antigen receptor comprises an amino acid sequence of an antibody. In some embodiments, the chimeric antigen receptor comprises the amino acid sequence of an antigen binding fragment of an antibody. The antibody (or fragment thereof) portion of the extracellular binding domain recognizes and binds to an epitope of an antigen. In some embodiments, the antibody fragment portion of a chimeric antigen receptor is a single chain variable fragment (scFv). An scFV comprises the light and variable fragments of a monoclonal antibody. In other embodiments, the antibody fragment portion of a chimeric antigen receptor is a multichain variable fragment, which can comprise more than one extracellular binding domains and therefore bind to more than one antigen simultaneously. In a multiple chain variable fragment embodiment, a hinge region may separate the different variable fragments, providing necessary spatial arrangement and flexibility.

[0512] In other embodiments, the antibody portion of a chimeric antigen receptor comprises at least one heavy chain and at least one light chain. In some embodiments, the antibody portion of a chimeric antigen receptor comprises two heavy chains, joined by disulfide bridges and two light chains, wherein the light chains are each joined to one of the heavy chains by disulfide bridges. In some embodiments, the light chain comprises a constant region and a variable region. Complementarity determining regions residing in the variable region of an antibody are responsible for the antibody's affinity for a particular antigen. Thus, antibodies that recognize different antigens comprise different complementarity determining regions. Complementarity determining regions reside in the variable domains of the extracellular binding domain, and variable domains (i.e., the variable heavy and variable light) can be linked with a linker or, in some embodiments, with disulfide bridges.

[0513] In some embodiments, the antigen recognized and bound by the extracellular domain is a protein or peptide, a nucleic acid, a lipid, or a polysaccharide. Antigens can be heterologous, such as those expressed in a pathogenic bacteria or virus. Antigens can also be synthetic; for example, some individuals have extreme allergies to synthetic latex and exposure to this antigen can result in an extreme immune reaction. In some embodiments, the antigen is autologous, and is expressed on a diseased or otherwise altered cell. For example, in some embodiments, the antigen is expressed in a neoplastic cell. In some embodiments, the neoplastic cell is a solid tumor cell. In other embodiments, the neoplastic cell is a hematological cancer, such as a B cell cancer. In some embodiments, the B cell cancer is a lymphoma (e.g., Hodgkins or non-Hodgkins lymphoma) or a leukemia (e.g., B-cell acute lymphoblastic leukemia). Exemplary B-cell lymphomas include Diffuse large B-cell lymphoma (DLBCL), primary mediastinal B-cell lymphoma, follicular lymphoma, Chronic lymphocytic leukemia (CLL), small lymphocytic lymphoma (SLL), mantle cell lymphomas, Marginal zone lymphoma, Burkitt lymphoma, Burkitt-like lymphoma, Lymphoplasmacytic lymphoma (Waldenstrom macroglobulinemia), and hairy cell leukemia. In some embodiments, the B cell cancer is multiple myeloma.

[0514] Antibody-antigen interactions are noncovalent interactions resulting from hydrogen bonding, electrostatic or hydrophobic interactions, or from van der Waals forces. The affinity of extracellular binding domain of the chimeric antigen receptor for an antigen can be calculated with the following formula:

K_{A}=[Antibody−Antigen]/[Antibody][Antigen], wherein

[Ab]=molar concentration of unoccupied binding sites on the antibody;
[Ag]=molar concentration of unoccupied binding sites on the antigen; and
[Ab-Ag]=molar concentration of the antibody-antigen complex.

[0515] The antibody-antigen interaction can also be characterized based on the dissociation of the antigen from the antibody. The dissociation constant (K_{D}) is the ratio of the association rate to the dissociation rate and is inversely proportional to the affinity constant. Thus, K_{D}=1/K_{A}. Those skilled in the art will be familiar with these concepts and will know that traditional methods, such as ELISA assays, can be used to calculate these constants.

[0516] The transmembrane domain of the chimeric antigen receptors described herein spans the CAR-T cells lipid bilayer cellular membrane and separates the extracellular binding domain and the intracellular signaling domain. In some embodiments, this domain is derived from other receptors having a transmembrane domain, while in other embodiments, this domain is synthetic. In some embodiments, the transmembrane domain may be derived from a non-human transmembrane domain and, in some embodiments, humanized. By “humanized” is meant having the sequence of the nucleic acid encoding the transmembrane domain optimized such that it is more reliably or efficiently expressed in a human subject. In some embodiments, the transmembrane domain is derived from another transmembrane protein expressed in a human immune effector cell. Examples of such proteins include, but are not limited to, subunits of the T cell receptor (TCR) complex, PD1, or any of the Cluster of Differentiation proteins, or other proteins, that are expressed in the immune effector cell and that have a transmembrane domain. In some embodiments, the transmembrane domain will be synthetic, and such sequences will comprise many hydrophobic residues.

[0517] The chimeric antigen receptor is designed, in some embodiments, to comprise a spacer between the transmembrane domain and the extracellular domain, the intracellular domain, or both. Such spacers can be 1, 2, 3, 4, 5, 6, 7, 8, 9, 10, 11, 12, 13, 14, 15, 16, 17, 18, 19, or 20 amino acids in length. In some embodiments, the spacer can be 20, 30, 40, 50, 60, 70, 80, 90, or 100 amino acids in length. In still other embodiments the spacer can be between 100 and 500 amino acids in length. The spacer can be any polypeptide that links one domain to another and are used to position such linked domains to enhance or optimize chimeric antigen receptor function.

[0518] The intracellular signaling domain of the chimeric antigen receptor contemplated herein comprises a primary signaling domain. In some embodiments, the chimeric antigen receptor comprises the primary signaling domain and a secondary, or co-stimulatory, signaling domain. In some embodiments, the primary signaling domain comprises one or more immunoreceptor tyrosine-based activation motifs, or ITAMs. In some embodiments, the primary signaling domain comprises more than one ITAM. ITAMs incorporated into the chimeric antigen receptor may be derived from ITAMs from other cellular receptors. In some embodiments, the primary signaling domain comprising an ITAM may be derived from subunits of the TCR complex, such as CD3γ, CD3ε, CD3ζ, or CD3δ (see FIG. 1A). In some embodiments, the primary signaling domain comprising an ITAM may be derived from FcRγ, FcRβ, CD5, CD22, CD79a, CD79b, or CD66d. The secondary signaling domain, in some embodiments, is derived from CD28. In other embodiments, the secondary signaling domain is derived from CD2, CD4, CDS, CD8a, CD83, CD134, CD137, ICOS, or CD154.

[0519] Provided herein are also nucleic acids that encode the chimeric antigen receptors described herein. In some embodiments, the nucleic acid is isolated or purified. Delivery of the nucleic acids ex vivo can be accomplished using methods known in the art. For example, immune cells obtained from a subject may be transformed with a nucleic acid vector encoding the chimeric antigen receptor. The vector may then be used to transform recipient immune cells so that these cells will then express the chimeric antigen receptor. Efficient means of transforming immune cells include transfection and transduction. Such methods are well known in the art. For example, applicable methods for delivery the nucleic acid molecule encoding the chimeric antigen receptor (and the nucleic acid(s) encoding the base editor) can be found in International Application No. PCT/US2009/040040 and U.S. Pat. Nos. 8,450,112; 9,132,153; and 9,669,058, each of which is incorporated herein in its entirety. Additionally, those methods and vectors described herein for delivering the nucleic acid encoding the base editor are applicable to delivering the nucleic acid encoding the chimeric antigen receptor.

[0520] Some aspects of the present invention provide for immune cells comprising a chimeric antigen and an altered endogenous gene that enhances immune cell function, resistance to immunosuppression or inhibition, or a combination thereof. In some embodiments, the altered endogenous gene may be created by base editing. In some embodiments, the base editing may reduce or attenuate the gene expression. In some embodiments, the base editing may reduce or attenuate the gene activation. In some embodiments, the base editing may reduce or attenuate the functionality of the gene product. In some other embodiments, the base editing may activate or enhance the gene expression. In some embodiments, the base editing may increase the functionality of the gene product. In some embodiments, the altered endogenous gene may be modified or edited in an exon, an intron, an exon-intron injunction, or a regulatory element thereof. The modification may be edit to a single nucleobase in a gene or a regulatory element thereof. The modification may be in a exon, more than one exons, an intron, or more than one introns, or a combination thereof. The modification may be in an open reading frame of a gene. The modification may be in an untranslated region of the gene, for example, a 3′-UTR or a 5′-UTR. In some embodiments, the modification is in a regulatory element of an endogenous gene. In some embodiments, the modification is in a promoter, an enhancer, an operator, a silencer, an insulator, a terminator, a transcription initiation sequence, a translation initiation sequence (e.g. a Kozak sequence), or any combination thereof.

[0521] Allogeneic immune cells expressing an endogenous immune cell receptor as well as a chimeric antigen receptor may recognize and attack host cells, a circumstance termed graft versus host disease (GVHD). The alpha component of the immune cell receptor complex is encoded by the TRAC gene, and in some embodiments, this gene is edited such that the alpha subunit of the TCR complex is nonfunctional or absent. Because this subunit is necessary for endogenous immune cell signaling, editing this gene can reduce the risk of graft versus host disease caused by allogeneic immune cells.

[0522] Host immune cells can potentially recognize allogeneic CAR-T cells as non-self and elicit an immune response to remove the non-self cells. B2M is expressed in nearly all nucleated cells and is associated with MHC class I complex (FIG. 1B). Circulating host CD8⁺ T cells can recognize this B2M protein as non-self and kill the allogeneic cells. To overcome this graft rejection, in some embodiments, the B2M gene is edited to either knockout or knockdown expression.

[0523] In some embodiments of the present invention, the PDCD1 gene is edited in the CAR-T cell to knockout or knockdown expression. The PDCD1 gene encodes the cell surface receptor PD-1, an immune system checkpoint expressed in immune cells, and it is involved in reducing autoimmunity by promoting apoptosis of antigen specific immune cells. By knocking out or knocking down expression of the PDCD1 gene, the modified CAR-T cells are less likely to apoptose, are more likely to proliferate, and can escape the programmed cell death immune checkpoint.

[0524] The CBLB gene encodes an E3 ubiquitin ligase that plays a significant role in inhibiting immune effector cell activation. Referring to FIG. 1C, the CBLB protein favors the signaling pathway resulting in immune effector cell tolerance and actively inhibits signaling that leads to immune effector cell activation. Because immune effector cell activation is necessary for the CAR-T cells to proliferate in vivo post-transplant, in some embodiments of the present invention the CBLB is edited to knockout or knockdown expression.

[0525] In some embodiments, editing of genes to enhance the function of the immune cell or to reduce immunosuppression or inhibition can occur in the immune cell before the cell is transformed to express a chimeric antigen receptor. In other aspects, editing of genes to enhance the function of the immune cell or to reduce immunosuppression or inhibition can occur in a CAR-T cell, i.e., after the immune cell has been transformed to express a chimeric antigen receptor.

[0526] In some embodiments, the immune cell may comprise a chimeric antigen receptor (CAR) and one or more edited genes, one or more regulatory elements thereof, or combinations thereof, wherein expression of the edited gene is either knocked out or knocked down. In some embodiments, the CAR-T cells have reduced immunogenicity as compared to a similar CAR-T cell but without further having the one or more edited genes as described herein. In some embodiments, the CAR-T cells have lower activation threshold as compared to a similar CAR-T but without further having the one or more edited genes as described herein. In some embodiments, the CAR-T cells have increased anti-neoplasia activity as compared to a similar CAR-T cell but without further having the one or more edited genes as described herein. The one or more genes may be edited by base editing. In some embodiments the one or more genes, or one or more regulatory elements thereof, or combinations thereof, may be selected from a group consisting of: c-abl oncogene 1 (Abl1); c-abl oncogene 2 (Abl2); a disintegrin and metalloprotease domain 8 (Adam8); a disintegrin and metalloprotease domain 17 (Adam 17); adenosine deaminase (Ada); adenosine kinase (Adk); adenosine A2a receptor (Adora2a); adenosine regulating molecule 1 (Adrm1); advanced glycosylation end product-specific receptor (Ager) allograft inflammatory factor 1 (Aif1); autoimmune regulator (Aire); ankyrin repeat and LEM domain (Ankle1); annecin A1 (Anxa1); adapter related protein complex 3 beta 1 sububit (Ap3b1); adapter related protein complex 3 delta 1 sububit (Ap3d1); amyloid beta (A4) precursor protein-binding family B member 1 interacting protein (Apbb1ip); WNT signaling pathway regulator (Apc); arginase liver (Arg 1); arginase type II (Arg 2); autophagy related 5 (Atg5); AtPase Cu++ transporting, alpha polypeptide (Atp7a); 5-azacytidine induced gene 2 (Azi2); beta 2 microglobulin (B2m); BL2-associated agonist of cell dealth (Bad); basic leucine zipper transcription factor, ATF-like (Batf); BCL2-associated X protein (Bax); B cell leukemia/lymphoma 2 (Bcl2); B cell leukemia/lymphoma 2 related protein A1d (Bcl2a1d); B cell leukemia/lymphoma 3 (Bcl3); B cell leukemia/lymphoma 6 (Bcl6); B cell leukemia/lymphoma 10 (Bcl10); B cell leukemia/lymphoma 11a (Bcllla); B cell leukemia/lymphoma 11b (Bcl11b); Bloom syndrome, RecQ like helicase (Blm); Bmi1 polycomb ring finger oncogene (Bmi1); Bone morphogenic protein 4 (Bmp4); Braf transforming gene (Braf); B and T lymphocyte associated (Btla); butyrophilin, subfamily 2, member A1 (Btn2a1); butyrophilin, subfamily 2, member A2 (Btn2a2); butyrophilin-like 1 (Btnl1); butyrophilin-like 2 (Btnl2); butyrophilin-like 6 (Btnl6); calcium channel, voltage dependent, beta 4 subunit (Cacnb4); caspase recruitment domain family member 11 (Card 11); capping protein regulator and myosin 1 linker 2 (Carmil2); Caspase 3 (Casp3); caveolin 1 (Cav1); core-binding factor beta (Cbfb); Casitas B-lineage lymphoma b (Cblb); coil-coil domain containing 88B (Ccdc88b); chemokine (C—C motif) ligand 2 (Ccl2); chemokine (C—C motif) ligand 5 (Ccl5); chemokine (C—C motif) ligand 19 (Ccl19); chemokine (C—C motif) ligand 20 (Ccl20); cyclin D3 (Ccnd3); chemokine (C—C motif) receptor 2 (Ccr2); chemokine (C—C motif) receptor 6 (Ccr6); chemokine (C—C motif) receptor 7 (Ccr7); chemokine (C—C motif) receptor 9 (Ccr9); CD1d1 antigen (Cd1d1); CD1d2 antigen (CD1d2); CD2 antigen (CD2); CD3 antigen, delta polypeptide (CD3d); CD3 antigen, epsilon polypeptide (CD3d); CD4 antigen (Cd4); CD5 antigen (Cd5); CD6 antigen (Cd6); CD8 antigen (Cd8); CD24a antigen (Cd24a); CD27 antigen (CD27); CD28 antigen (Cd28); CD40 ligand (Cd401g); CD44 antigen (Cd44); CD46 antigen, complement regulatory protein (Cd46); CD47 antigen (Rh-related antigen, integrin-associated signal transducer) (Cd47); CD48 antigen (Cd48); CD59b antigen (Cd59b); CD74 antigen (Cd74); CD80 antigen (Cd80); CD81 antigen (Cd81); CD83 antigen (Cd83); CD86 antigen (Cd86); CD151 antigen (Cd151); CD160 antigen (Cd160); CD209e antigen (Cd209e); CD244 molecule A (Cd244a); CD274 antigen (Cd274); CD276 antigen (Cd276); CD300A molecule (Cd300a); cadherin-like 26(Cdh26); cyclin-dependent kinase (Cdk6); cyclin dependent kinase inhibitor 2A (Cdkn2a); carcinoembryonic antigen-related cell adhesion molecule (Ceacam1); CCAAT/enhancer binding protein (C/EBP), beta (Cebpb); cyclic GMP-AMP synthase (Cgas); chromodomain helicase DNA binding protein 7 (Chd7); cholinergic receptor, nicotinic, alpha polypeptide 7 (Chrna7); C-type lectin domain family 2, member i (Clec2i); C-type lectin domain family 4, member a2 (Clec4a2); C-type lectin domain family 4, member d (Clec4d); C-type lectin domain family 4, member e (Clec4e); C-type lectin domain family 4, member f (Clec4f); C-type lectin domain family 4, member g (Clec4g); cleft lip and palate associated transmembrane protein 1 (Clptm1); coronin, actin binding protein 1A (Coro1a); cysteine-rich protein 3 (Crip3); c-src tyrosine kinase (Csk); cytotoxic T lymphocyte-associated protein 2 alpha (Ctla2a); cytotoxic T-lymphocyte-associated protein 4 (Ctla4); catenin (cadherin associated protein), beta 1 (Ctnnb1); cytidine 5′-triphosphate synthase (Ctps); coxsackie virus and adenovirus receptor (Cxadr); chemokine (C—X—C motif) ligand 12 (Cxcl12); chemokine (C—X—C motif) receptor (Cxcr4); CYLD lysine 63 deubiquitinase (Cyld); cytochrome P450, family 26, subfamily b, polypeptide (Cyp26b1); dolichyl-di-phosphooligosaccharide-protein glycotransferase (Ddost); deoxyhypusine synthase (Dhps); dicer 1, ribonuclease type III (Dicer1); discs large MAGUK scaffold protein 1 (Dlg1); discs large MAGUK scaffold protein 5 (Dlg5); delta like canonical Notch ligand 4 (D114); DnaJ heat shock protein family (Hsp40) member A3 (Dnaja3); dedicator of cytokinesis 2 (Dock2); dedicator of cytokinesis 8 (Dock8); dipeptidylpeptidase 4 (Dpp4); drosha, ribonuclease type III (Drosha); deltex 1, E3 ubiquitin ligase (Dtx1); dual specificity phosphatase 3 (Dusp3); dual specificity phosphatase 10 (Dusp10); dual specificity phosphatase 22 (Dusp22); double homeobox B-like 1 (Duxb11); Epstein-Barr virus induced gene 3 (Ebi3); ephrin B1 (Efnb1); ephrin B2 (Efnb2); ephrin B3 (Efnb3); early growth response 1(Egr1); early growth response 3 (Egr3); eukaryotic translation initiation factor 2 alpha kinase 4 (Eif2ak4); E74-like factor 4 (Elf4); eomesodermin (Eomes); Eph receptor B4 (Ephb4); Eph receptor B6 (Ephb6); erythropoietin (Epo); erb-b2 receptor tyrosine kinase (Erbb2); coagulation factor II (thrombin) receptor-like 1 (F2rl1); Fas (TNFRSF6)-associated via death domain (Fadd); family with sequence similarity 49, member B (Fam49b); Fanconi anemia, complementation group A (Fanca); Fanconi anemia, complementation group D2 (Fancd2); Fas (TNF receptor superfamily member 6) (Fas); Fc receptor, IgE, high affinity I, gamma polypeptide (Fcerlg); fibrinogen-like protein 1 (Fgl1); fibrinogen-like protein 2 (Fgl2); FK506 binding protein 1a (Fkbp1a); FK506 binding protein 1b ((Fkbp1b); flotillin 2 (Flot2); FMS-like tyrosine kinase (Flt3); forkhead box J1 (Foxj1); forkhead box N1 (Foxn1); forkhead box P1 (Foxp1); forkhead box P3 (Foxp3); fucosyltransferase 7 (Fut7); Fyn proto-oncogene (Fyn); frizzled class receptor 5 (Fzd5); frizzled class receptor 7 (Fzd7); frizzled class receptor 8 (Fzd8); growth arrest and DNA-damage-inducible 45 gamma (Gadd45g); GATA binding protein 3 (GATA3); GTPase, IMAP family member 1 (Gimap1); gap junction protein, alpha 1 (Gja1); GLI-Kruppel family member GLI3 (Gli3); glycerol-3-phosphate acyltransferase, mitochondrial (Gpam); G protein-coupled receptor 18 (Gpr18); gelsolin (Gsn); histocompatibility 2, class II antigen A, alpha (H2-Aa); histocompatibility 2, class II antigen A, beta 1 (H2-Ab1); histocompatibility 2, class II, locus DMa (H2-DMa); histocompatibility 2, M region locus 3(H3-M3); histocompatibility 2, O region alpha locus (H2-Oa); histocompatibility 2, T region locus 23 (H2-T23); hepatitis A virus cellular receptor 2 (Havcr2); haematopoietic 1 (hem1); hes family bHLH transcription factor 1 (Hes1); homeostatic iron regulator (Hfe); H2.0-like homeobox (Hlx); HCLS1 binding protein 3 (Hslbp3); hematopoietic SH2 domain containing (Hsh2d); heat shock protein 90, alpha (cytosolic), class A member 1 (Hsp90aa1); heat shock protein 1 (chaperonin) (Hspd1); heat shock 105 kDa/110 kDa protein 1 (Hsph1); intercellular adhesion molecule 1 (Icam1); inducible T cell co-stimulator (Icos); icos ligand (Icos1); indoleamine 2,3-dioxygenase 1 (Ido1); interferon alpha 1 (Ifna1); interferon alpha 2 (Ifna2); interferon alpha 4 (Ifna4); interferon alpha 5 (Ifna5); interferon alpha 6 (Ifna6); interferon alpha 7 (Ifna7); interferon alpha 9 (Ifna9); interferon alpha 11 (Ifna11); interferon alpha 12 (Ifna12); interferon alpha 13 (Ifna13); interferon alpha 14 (Ifna14); interferon alpha 15 (Ifna15); interferon alpha 16 (Ifna16); interferon alpha B (Ifnab); interferon (alpha and beta) receptor 1 (Ifnar1); interferon beta 1 (Ifnb1); interferon gamma (Ifng); interferon kappa (Ifnk); interferon zeta (Ifnz); insulin-like growth factor 1 (Igf1); insulin-like growth factor 2 (Igf2); insulin-like growth factor binding protein 2 (Igfbp2); Indian hedgehog (Ihh); IKAROS family zinc finger 1 (Ikzf1); interleukin 1 beta (Il1b; interleukin 1 family, member 8 (Il1f); interleukin 1 receptor-like 2 (Il1r12); interleukin 2 (Il2); interleukin 2 receptor, alpha chain (Il2ra); interleukin 2 receptor, gamma chain (Il2rg); interleukin 4 (Il4); interleukin 4 receptor, alpha (Il4ra); interleukin 6 (Il6); interleukin 6 signal transducer (Il6st); interleukin 7 (Il7); interleukin 7 receptor (Il7r); interleukin 12a (Il12a); interleukin 12b (Il12b); interleukin 12 receptor, beta1 (Il12rb1); interleukin 15 (Il15); interleukin 18 (Il18); interleukin 18 receptor 1 (Il18r1); interleukin 20 receptor beta (Il20rb); interleukin 21 (Il21); interleukin 23, alpha subunit p19 (1123a); interleukin 27 (Il27); insulin II (Ins2); interferon regulatory factor 1 (Irf1); interferon regulatory factor 4 (Irf4); itchy, E3 ubiquitin protein ligase (Itch); integrin, alpha D (Itgad); integrin alpha L (Itga1); integrin alpha M (Itgam); integrin alpha V (Itgav); integrin alpha X (Itgax); integrin beta 2 (Itgb2); IL2 inducible T cell kinase (Itk); inositol 1,4,5-trisphosphate 3-kinase B (Itpkb); jagged 2 (Jag2); Janus kinase 3 (Jak3); junction adhesion molecule like 9 (Jam9); jumonji domain containing 6 (Jmjd6); K (lysine) acetyltransferase 2A (Kat2a); KDEL (Lys-Asp-Glu-Leu) endoplasmic reticulum protein retention receptor 1 (Kdelr1); KIT proto-oncogene receptor tyrosine kinase (Kit); lymphocyte-activation gene 3 (Lag3); linker for activation of T cells (Lat); lymphocyte transmembrane adaptor 1 (Lax1); lymphocyte protein tyrosine kinase (Lck); lymphocyte cytosolic protein 1 (Lcp1); lymphoid enhancer binding factor 1 (Lef1); leptin (Lep); leptin receptor (Lepr); LFNG O-fucosylpeptide 3-beta-N-acetylglucosaminyltransferase (Lfng); lectin, galactose binding, soluble 1 (Lgals1); lectin, galactose binding, soluble 3 (Lgals3); lectin, galactose binding, soluble 8 (Lgals8); lectin, galactose binding, soluble 9 (Lgals9); ligase IV, DNA, ATP-dependent (Lig4); leukocyte immunoglobulin-like receptor, subfamily B, member 4A (Lilrb4a); limb region 1 like (Lmbr1); LIM domain only 1 (Lmo1); lysyl oxidase-like 3 (Loxl3); leucine rich repeat containing 32 (Lrrc32); lymphocyte antigen 9 (Ly9); MAD1 mitotic arrest deficient 1-like 1 (Mad1l1); v-maf musculoaponeurotic fibrosarcoma oncogene family, protein B (avian) (Mafb); MALT1 paracaspase (Malt1); mitogen-activated protein kinase 8 interacting protein 1 (Mapk8ip10); membrane associated ring-CH-type finger 7 (Marchf7); midkine (Mdk); methyltransferase like 3 (Mettl3); MHC I like leukocyte 2 (Mill2); myelin protein zero-like 2 (Mpzl2); moesin (Msn); mechanistic target of rapamycin kinase (Mtor); myeloblastosis oncogene (Myb); myosin, heavy polypeptide 9, non-muscle (Myh9); non-SMC condensin II complex, subunit H2 (Ncaph2); non-catalytic region of tyrosine kinase adaptor protein 1 (Nck1); non-catalytic region of tyrosine kinase adaptor protein 2 (Nck2); NCK associated protein 1 like (Nckap1l); nuclear receptor co-repressor 1 (Ncor1); nicastrin (Ncstn); Nedd4 family interacting protein 1 (Ndfip1); neural precursor cell expressed, developmentally down-regulated 4 (Nedd4); nuclear factor of activated T cells, cytoplasmic, calcineurin dependent (Nfatc3); nuclear factor of kappa light polypeptide gene enhancer in B cells inhibitor, delta (Nfkbid); non-homologous end joining factor 1 (Nhej1); NFKB activating protein (Nkap); NK2 homeobox 3 (Nkx2-3); NLR family, CARD domain containing 3 (Nlrc3); NLR family, pyrin domain containing 3 (Nlrp3); Notch-regulated ankyrin repeat protein (Nrarp); OTU domain containing 5 (Otud5); purinergic receptor P2X, ligand-gated ion channel, 7 (P2rx7); phosphoprotein associated with glycosphingolipid microdomains 1 (Pag1); POZ (BTB) and AT hook containing zinc finger 1 (Patz1); PRKC, apoptosis, WT1, regulator (Pawr); paired box 1 (Pax1); programmed cell death 1 ligand 2 (Pdcd1lg2); phosphodiesterase 5A, cGMP-specific (Pde5a); pellino 1 (Peli1); phosphoinositide-3-kinase regulatory subunit (Pik3r6); phospholipase A2, group IIA (Pla2g2a); phospholipase A2, group IID (Pla2g2d); phospholipase A2, group IIE (Pla2g2e); phospholipase A2, group IIF (Pla2g2f); purine-nucleoside phosphorylase (Pnp); protein phosphatase 3, catalytic subunit, beta isoform (Ppp3cb); PR domain containing 1, with ZNF domain (Prdm1); peroxiredoxin 2 (Prdx2); protein kinase, cAMP dependent regulatory, type I, alpha (Prkar1a); protein kinase C, theta 2 (Prkcq); protein kinase C, zeta (Prkcz); protein kinase, DNA activated, catalytic polypeptide (Prkdc); prosaposin (Psap); presenilin 1 (Psen1); presenilin 2 (Psen2); prostaglandin E receptor 4 (subtype EP4) (Ptger4); protein tyrosine phosphatase, non-receptor type 2 (Ptpn2); protein tyrosine phosphatase, non-receptor type 6 (Ptpn6); protein tyrosine phosphatase, non-receptor type 22 (lymphoid) (Ptpn22); protein tyrosine phosphatase, receptor type, C (Ptprc); PYD and CARD domain containing 7 (Pycard); RAB27A, member RAS oncogene family (Rab27a); RAB29, member RAS oncogene family (Rab29); (Rac family small GTPase 2); recombination activating gene 1 (Rag1); recombination activating gene 2 (Rag2); RAS protein activator like 3 (Rasal3); RAS guanyl releasing protein 1 (Rasgrp1); RING CCCH (C3H) domains 1 (Rc3h1); ring finger and CCCH-type zinc finger domains 2 (Rc3h2); ras homolog family member A (Rhoa); ras homolog family member H (Rhoh); receptor (TNFRSF)-interacting serine-threonine kinase 2 (Ripk2); RHO family interacting cell polarization regulator 2 (Ripor2); RAR-related orphan receptor alpha (Rora); RAR-related orphan receptor gamma (Ror); ribosomal protein L22 (Rpl 22); ribosomal protein S6 (Rps6); radical S-adenosyl methionine domain containing 2 (Rsad2); runt related transcription factor 1 (Runx1); runt related transcription factor 2 (Runx2); runt related transcription factor 3 (Runx3); squamous cell carcinoma antigen recognized by T cells (Sart1); SAM and SH3 domain containing 3 (Sash3); special AT-rich sequence binding protein 1 (Satb1); syndecan 4 (Sdc4); selenoprotein K (Selenok); sema domain, immunoglobulin domain (Ig), transmembrane domain (TM) and short cytoplasmic domain, (semaphorin) 4A (Sema4a); surfactant associated protein D (Sftpd); SH3 domain containing ring finger 1 (Sh3rf1); src homology 2 domain-containing transforming protein B (Shb); sonic hedgehog (Shh); signal-regulatory protein alpha (Sirpa); Signal-regulatory protein beta 1A (Sirpb1a); Signal-regulatory protein beta 1B (Sirpb1b); Signal-regulatory protein beta 1C (Sirpb1c); suppression inducing transmembrane adaptor 1 (Sit1); Src-like-adaptor 2 (Sla2); SLAM family member 6 (Slamf6); solute carrier family 4 (anion exchanger), member 1; (Slc4a1); solute carrier family 11 (proton-coupled divalent metal ion transporters), member 1 (Slc11a1); solute carrier family 46, member 2 (Slc46a2); schlafen 1; SMAD family member 3 (Smad3); SMAD family member 7 (Smad7); suppressor of cytokine signaling 1 (Socs1); suppressor of cytokine signaling 5 (Socs5); suppressor of cytokine signaling 6 (Socs6); SOS Ras/Rac guanine nucleotide exchange factor 1 (Sos1), SOS Ras/Rac guanine nucleotide exchange factor 2 (Sos2), SRY (sex determining region Y)-box 4 (Sox4); sialophorin (Spn); signal transducer and activator of transcription 3 (Stat3); signal transducer and activator of transcription 5A (Stat5A); signal transducer and activator of transcription 5B (Stat5B); serine/threonine kinase 11 (Stk11); syntaxin 11 (Stx11); spleen tyrosine kinase (Syk); T cell-interacting, activating receptor on myeloid cells 1 (Tarm1); T-box 21 (Tbx21); T cell, immune regulator 1, ATPase, H+ transporting, lysosomal VO protein A3 (Tcirg1); transforming growth factor, beta 1 (Tgfb1); transforming growth factor, beta receptor II (Tgfbr2); thymocyte selection associated (Themis); thymus cell antigen 1, theta (Thy1); T cell immunoreceptor with Ig and ITIM domains (Tigit); transmembrane protein 98 (Tmem98); transmembrane 131 like (Tmem131l); tumor necrosis factor, alpha-induced protein 8-like 2 (Tnfalp8l2); tumor necrosis factor receptor superfamily, member 4 (Tnfrsf4); tumor necrosis factor receptor superfamily, member 13c (Tnfrsf13c); tumor necrosis factor (ligand) superfamily, member 4 (Tnfsf4); tumor necrosis factor (ligand) superfamily, member 8 (Tnfsf8); tumor necrosis factor (ligand) superfamily, member 9 (Tnfsf9); tumor necrosis factor (ligand) superfamily, member 11 (Tnfsf11); tumor necrosis factor (ligand) superfamily, member 13b (Tnfsf13b); tumor necrosis factor (ligand) superfamily, member 14 (Tnfsf14); tumor necrosis factor (ligand) superfamily, member 18 (Tnfsf18); TNF receptor-associated factor 6 (Traf6); triggering receptor expressed on myeloid cells-like 2 (Trem12); T cell receptor alpha joining 18 (Traj18); three prime repair exonuclease 1 (Trex1); transformation related protein 53 (Trp53); TSC complex subunit 1 (Tsc1); twisted gastrulation BMP signaling modulator 1 (Twsg1); vascular cell adhesion molecule 1 (Vcam1); vanin 1 (Vnn1); V-set and immunoglobulin domain containing 4 (Vsig4); WD repeat and FYVE domain containing 4 (Wdfy4); wingless-type MMTV integration site family, member 1 (Wnt1); wingless-type MMTV integration site family, member 4 (Wnt4); WW domain containing E3 ubiquitin protein ligase 1 (Wwp1); chemokine (C motif) ligand 1 (Xcl1); zinc finger and BTB domain containing 1 (Zbtb1); zinc finger and BTB domain containing 7B (Zbtb7B); zinc finger CCCH type containing 8 (Zc3h8); zinc finger CCCH type containing 12A (Zc3h12a); zinc finger CCCH type containing 12D (Zc3h12d); zinc finger E-box binding homeobox 1 (Zeb1); zinc finger protein 36, C3H type (Zfp36); zinc finger protein 36, C3H type-like 1 (Zfp36L1); zinc finger protein 36, C3H type-like 2 (Zfp36L2); and zinc finger protein 683 (Zfp683).

[0527] In some embodiments, an immune cell comprises a chimeric antigen receptor and one or more edited genes, a regulatory element thereof, or combinations thereof. An edited gene may be an immune response regulation gene, an immunogenic gene, a checkpoint inhibitor gene, a gene involved in immune responses, a cell surface marker, e.g. a T cell surface marker, or any combination thereof. In some embodiments, an immune cell comprises a chimeric antigen receptor and an edited gene that is associated with activated T cell proliferation, for example, Fyn, Itgad, Itga1, Itgam, Itgb2, Satb1, or, Ephb6, a regulatory elements thereof, or combinations thereof. In some embodiments, an immune cell comprises a chimeric antigen receptor and an edited gene that is associated with alpha-beta T cell activation, for example, Dock2, Rorc, Lef1, or TCF7, their regulatory elements thereof, or combinations thereof. In some embodiments, an immune cell comprises a chimeric antigen receptor and an edited gene that is associated with gamma-delta T cell activation, for example, Jag2, Sox13, Mill2, or Jam1, their regulatory elements thereof, or combinations thereof. In some embodiments, an immune cell comprises a chimeric antigen receptor and an edited gene that is associated with positive regulation of T cell proliferation, for example, Cd24a, Cd86, Epo, Fadd, Icos1, Igf1, Igf2, Igfbp2, Tnfsf4, Tnfsf9, Gpam, Il2, Il2ra, Il4, Stat5a, Stat5b, Gli3, Ihh, Itpkb, Nkap, Shh, Ada, Cd24a, Cd28, Ceacam1, Socs1, Cd83, Cd81, Cd74, Bad, Gata3, interleukin 2, interleukin 2 receptor alpha chain, interleukin 4, interleukin 7, interleukin 12a or FoxP3 or their regulatory elements thereof, or combinations thereof. In some embodiments, an immune cell comprises a chimeric antigen receptor and an edited gene that is negative regulation of T-helper cell proliferation or differentiation, for example, Xcl1, Jak3, Rc3h1, Rc3h2, Tbx21, Zbtb7b, Tbx21, Zc3h12a, Smad3, Loxl3, Socs5, Zfp35, or Bcl6 or their regulatory elements thereof, or combinations thereof. In some embodiments, the edited gene may be a checkpoint inhibitor gene, for example, such as a PD1 gene, a PDL1 gene, or a member related to or regulating the pathway of their formation or activation.

[0528] In some embodiments, provided herein is an immune cell with an edited TRAC gene (wherein, the TRAC gene may comprise one, two, three, four, five, six, seven eight, nine, ten or more base edits), such that the immune cell does not express an endogenous functional T cell receptor alpha chain. In some embodiments, the immune cell is a T cell expressing a chimeric antigen receptor (a CAR-T cell). In some embodiments, provided herein is a CAR-T cell with base edits in TRAC gene, such that the CAR-T cell have reduced or negligible or no expression of endogenous T cell receptor alpha protein.

[0529] In some embodiments, the immune cell comprises an edited TRAC gene, and additionally, at least one edited gene. The at least one edited gene may be selected from the list of genes mentioned in the preceding paragraphs. In one embodiment, the immune cell may comprise an edited TRAC gene, an edited PDCD1 gene, an edited CD52 gene, an edited CD7 gene, an edited B2M gene, an edited CD5 gene, an edited CBLB gene, or any combination thereof. In some embodiments, a single modification event (such as electroporation), may introduce one or more gene edits. In some embodiments at least four, five, six, seven, eight, nine, ten, eleven, twelve, thirteen, fourteen, fifteen, sixteen, seventeen, eighteen, nineteen, twenty or more edits may be introduced in one or more genes simultaneously.

[0530] In some embodiments, the immune cell comprises an edited TRAC gene, and an edited PDCD1, CD52, CD7, B2M, CD5, or CBLB gene, or a combination thereof. In some embodiments, the immune cell comprises one or more of edited genes, selected from TRAC, PDCD1, CD52, CD7, B2M, CD5, B2M, CD5, and CBLB gene.

[0531] In some embodiments, the immune cell may comprise an edited TRAC gene, an edited CD2 gene, an edited CD3 epsilon gene, an edited CD3 gamma gene, an edited CD3 delta gene, an edited CD5 gene, an edited CD7 gene, an edited CD30 gene, an edited CD33 gene, an edited B2M gene, an edited CD52 gene, an edited CD70 gene, an edited CBLB gene, an edited CIITA gene, or any combination thereof.

[0532] In some embodiments, provided herein is an immune cell with an edited TRBC1 or TRBC2 gene, such that the immune cell does not express an endogenous functional T cell receptor beta chain. In some embodiments, provided herein is a CAR-T cell with an edited TRBC1/TRBC2 gene, such that the CAR-T cell exhibits reduced or negligible expression or no expression of endogenous T cell receptor beta chain.

[0533] In some embodiments, the immune cell comprises an edited TRBC1/TRBC2 gene, and additionally, at least edited gene. The at least one edited gene may be selected from the list of genes mentioned in the preceding paragraphs. In some embodiments, the immune cell comprises an edited TRBC1/TRBC2 gene, and an edited PDCD1, CD52 or CD7 gene, or a combination thereof. In some embodiments, the CAR-T cell comprises one or more of base edited genes, selected from TRBC1/TRBC2 gene, PDCD1, CD52, and CD7 genes. In some embodiments, each edited gene may comprise a single base edit. In some embodiments, each edited gene may comprise multiple base edits at different regions of the gene.

[0534] In some embodiments, the immune cell comprises an edited TRBC1/TRBC2 genes, and an edited PDCD1, CD52, CD7, B2M, CD5, or CBLB gene, or a combination thereof. In some embodiments, the immune cell may be a CAR-T cell. In some embodiments, the CAR-T cell comprises one or more edited gene, selected from TRBC1/TRBC2, PDCD1, CD52, CD7, B2M, CD5, B2M, CD5, and CBLB gene.

[0535] In some embodiments, the immune cell may comprise an edited TRBC1/TRBC2 gene, an edited CD2 gene, an edited CD3 epsilon gene, an edited CD3 gamma gene, an edited CD3 delta gene, an edited CD5 gene, an edited CD7 gene, an edited CD30 gene, an edited CD33 gene, an edited B2M gene, an edited CD52 gene, an edited CD70 gene, an edited CBLB gene, an edited CIITA gene, or any combination thereof.

[0536] In some embodiments, an immune cell comprises a chimeric antigen receptor and an edited TRAC, B2M, PDCD1, CBLB gene, or a combination thereof, wherein expression of the edited gene is either knocked out or knocked down. In some embodiments, an immune cell comprises a chimeric antigen receptor and an edited TRAC gene, wherein expression of the edited gene is knocked out or knocked down. In some embodiments, an immune cell comprises a chimeric antigen receptor and edited TRAC and B2M genes, wherein expression of the edited genes is either knocked out or knocked down. In some embodiments, an immune cell comprises a chimeric antigen receptor and edited TRAC and PDCD1 genes, wherein expression of the edited genes is either knocked out or knocked down. In some embodiments, an immune cell comprises a chimeric antigen receptor and edited TRAC and CBLB genes, wherein expression of the edited genes is either knocked out or knocked down. In some embodiments, an immune cell comprises a chimeric antigen receptor and edited TRAC, B2M, and PDCD1 genes, wherein expression of the edited genes is either knocked out or knocked down. In some embodiments, an immune cell comprises a chimeric antigen receptor and edited TRAC, B2M, and CBLB genes, wherein expression of the edited genes is either knocked out or knocked down. In some embodiments, an immune cell or immune effector cell comprises a chimeric antigen receptor and edited TRAC, PDCD1, and CBLB genes, wherein expression of the edited genes is either knocked out or knocked down. In some embodiments, an immune cell comprises a chimeric antigen and edited TRAC, B2M, PDCD1, and CBLB genes, wherein expression of the edited genes is either knocked out or knocked down. In some embodiments, an immune cell comprises a chimeric antigen receptor and an edited B2M gene, wherein expression of the edited genes is either knocked out or knocked down. In some embodiments, an immune cell comprises a chimeric antigen receptor and edited B2M and PDCD1 genes, wherein expression of the edited genes is either knocked out or knocked down. In some embodiments, an immune cell comprises a chimeric antigen receptor and edited B2M and CBLB genes, wherein expression of the edited genes is either knocked out or knocked down. In some embodiments, an immune cell comprises a chimeric antigen receptor and edited B2M, PDCD1, and CBLB genes, wherein expression of the edited genes is either knocked out or knocked down. In some embodiments, an immune cell comprises a chimeric antigen receptor and an edited PDCD gene, wherein expression of the edited genes is either knocked out or knocked down. In some embodiments, an immune cell comprises a chimeric antigen receptor and edited PDCD1 and CBLB genes, wherein expression of the edited genes is either knocked out or knocked down. In some embodiments, an immune cell comprises a chimeric antigen receptor and an edited CBLB, expression of the edited gene is either knocked out or knocked down.

[0537] In some embodiments, an immune cell comprises a chimeric antigen receptor and an edited TRAC, an edited CD2 gene, an edited CD3 epsilon gene, an edited CD3 gamma gene, an edited CD3 delta gene, an edited CD5 gene, an edited CD7 gene, an edited CD30 gene, an edited CD33 gene, an edited B2M gene, an edited CD52 gene, an edited CD70 gene, an edited CBLB gene, an edited CIITA gene, or any combination thereof, wherein expression of the edited gene is either knocked out or knocked down.

[0538] In some embodiments, an immune cell comprises a chimeric antigen receptor and an edited TRBC1 or TRBC2 gene, an edited CD2 gene, an edited CD3 epsilon gene, an edited CD3 gamma gene, an edited CD3 delta gene, an edited CD5 gene, an edited CD7 gene, an edited CD30 gene, an edited CD33 gene, an edited B2M gene, an edited CD52 gene, an edited CD70 gene, an edited CBLB gene, an edited CIITA gene, or any combination thereof, wherein expression of the edited gene is either knocked out or knocked down.

[0539] In some embodiments, an immune cell, including but not limited to any immune cell comprising an edited gene selected from any of the aforementioned gene edits, can be edited to generate mutations in other genes that enhance the CAR-T's function or reduce immunosuppression or inhibition of the cell. For example, in some embodiments, an immune cell comprises a chimeric antigen receptor and an edited TGFBR2, ZAP70, NFATc1, TET2 gene, or a combination thereof, wherein expression of the edited gene is either knocked out or knocked down. In some embodiments, an immune cell comprises a chimeric antigen receptor and an edited TGFBR2 gene, wherein expression of the edited gene is knocked out or knocked down. In some embodiments, an immune cell comprises a chimeric antigen receptor and edited TGFBR2 and ZAP70 genes, wherein expression of the edited genes is either knocked out or knocked down. In some embodiments, an immune cell comprises a chimeric antigen receptor and edited TGFBR2 and ZAP70 genes, wherein expression of the edited genes is either knocked out or knocked down. In some embodiments, an immune cell comprises a chimeric antigen receptor and edited TGFBR2 and NFATC1 genes, wherein expression of the edited genes is either knocked out or knocked down. In some embodiments, an immune cell comprises a chimeric antigen receptor and edited TGFBR2 and TET2 genes, wherein expression of the edited genes is either knocked out or knocked down. In some embodiments, an immune cell comprises a chimeric antigen receptor and edited TGFBR2, ZAP70, and NFATC1 genes, wherein expression of the edited genes is either knocked out or knocked down. In some embodiments, an immune cell comprises a chimeric antigen receptor and edited TGFBR2, ZAP70, and TET2 genes, wherein expression of the edited genes is either knocked out or knocked down. In some embodiments, an immune cell comprises a chimeric antigen receptor and edited TGFBR2, NFATC1, and TET2 genes, wherein expression of the edited genes is either knocked out or knocked down. In some embodiments, an immune cell comprises a chimeric antigen and edited TGFBR2, ZAP70, NFATC1, and TET2 genes, wherein expression of the edited genes is either knocked out or knocked down. In some embodiments, an immune cell comprises a chimeric antigen receptor and an edited ZAP70 gene, wherein expression of the edited genes is either knocked out or knocked down. In some embodiments, an immune cell comprises a chimeric antigen receptor and edited ZAP70 and NFATC1 genes, wherein expression of the edited genes is either knocked out or knocked down. In some embodiments, an immune cell comprises a chimeric antigen receptor and edited ZAP70 and TET2 genes, wherein expression of the edited genes is either knocked out or knocked down. In some embodiments, an immune cell comprises a chimeric antigen receptor and edited ZAP70, PDCD1, and TET2 genes, wherein expression of the edited genes is either knocked out or knocked down. In some embodiments, an immune cell comprises a chimeric antigen receptor and an edited PCDC1 gene, wherein expression of the edited genes is either knocked out or knocked down. In some embodiments, an immune cell comprises a chimeric antigen receptor and edited PCDC1 and TET2 genes, wherein expression of the edited genes is either knocked out or knocked down. And in some embodiments, an immune cell comprises a chimeric antigen receptor and an edited TET2, expression of the edited gene is either knocked out or knocked down.

[0540] Editing of Target Genes in Immune Cells

[0541] In some embodiments, provided herein is an immune cell with at least one modification in an endogenous gene or regulatory elements thereof. In some embodiments, the immune cell may comprise at least one modification in each of at least two, at least three, four, five, six, seven, eight, nine, ten, eleven, twelve, thirteen, fourteen, fifteen, sixteen, seventeen, eighteen, nineteen, twenty or more endogenous genes or regulatory elements thereof. In some embodiments, the at least one modification is a single nucleobase modification. In some embodiments, the at least one modification is by base editing. The base editing may be positioned at any suitable position of the gene, or in a regulatory element of the gene. Thus, it may be appreciated that a single base editing at a start codon, for example, can completely abolish the expression of the gene. In some embodiments, the base editing may be performed at a site within an exon. In some embodiments, the base editing may be performed at a site on more than one exons. In some embodiments, the base editing may be performed at any exon of the multiple exons in a gene. In some embodiments, base editing may introduce a premature STOP codon into an exon, resulting in either lack of a translated product or in a truncated that may be misfolded and thereby eliminated by degradation, or may produce an unstable mRNA that is readily degraded. In some embodiments, the immune cell is a T cell. In some embodiments, the immune cell is a CAR-T cell.

[0542] In some embodiments, base editing may be performed, for example on exon 1, or exon 2, or exon 3 or exon 4 of human TRAC gene (UCSC genomic database ENSG00000277734.8). In some embodiments, base editing in human TRAC gene is performed at a site within exon 1. In some embodiments, base editing in human TRAC gene is performed at a site within exon 2. In some embodiments, base editing in human TRAC gene is performed at a site within exon 3. In some embodiments, base editing in human TRAC gene is performed at a site within exon 4. In some embodiments one or more base editing actions can be performed on human TRAC gene, at exon 1, exon 2, exon 3, exon 4 or any combination thereof.

[0543] For example, base editing may be performed on exon 1, or exon 2, or exon 3 or exon 4, of human B2M gene (Chromosome 15, NC_000015.10, 44711492-44718877; exemplary mRNA sequence NM_004048). In some embodiments, base editing in human B2M gene is performed at a site within exon 1. In some embodiments, base editing in human B2M gene is performed at a site within exon 2. In some embodiments, base editing in human B2M gene is performed at a site within exon 3. In some embodiments, base editing in human B2M gene is performed at a site within exon 4. In some embodiments one or more base editing actions can be performed on human B2M gene, at exon 1, exon 2, exon 3, exon 4 or any combination thereof.

[0544] In some embodiments, base editing may be performed on an intron. For example, base editing may be performed on an intron. In some embodiments, the base editing may be performed at a site within an intron. In some embodiments, the base editing may be performed at a site on more than one introns. In some embodiments, the base editing may be performed at any exon of the multiple introns in a gene. In some embodiments, one or more base editing may be performed on an exon, an intron or any combination of exons and introns.

[0545] For example, base editing may be performed, for example on any one or more of the introns in human TRAC gene. In some embodiments, base editing in human TRAC gene is performed at a site within intron 1. In some embodiments, base editing in human TRAC gene is performed at a site within intron 2. In some embodiments, base editing in human TRAC gene is performed at a site within intron 3. In some embodiments one or more base editing actions can be performed on human TRAC gene, at exon 1, exon 2, exon 3, exon 4, intron 1, intron 2, intron 3, or any combination thereof. In some embodiments one or more base edits can be performed on the last noncoding exon of human TRAC gene.

[0546] In some embodiments, the modification or base edit may be within a promoter site. In some embodiments, the base edit may be introduced within an alternative promoter site. In some embodiments, the base edit may be in a 5′ regulatory element, such as an enhancer. In some embodiment, base editing may be introduced to disrupt the binding site of a nucleic acid binding protein. Exemplary nucleic acid binding proteins may be a polymerase, nuclease, gyrase, topoisomerase, methylase or methyl transferase, transcription factors, enhancer, PABP, zinc finger proteins, among many others.

[0547] In some embodiments, base editing may generate a splice acceptor-splice donor (SA-SD) site. For example, targeted base editing generating a SA-SD, or at a SA-SD site can result in reduced expression of a gene. For example, exon 1 SD site of TRAC at C5 may be targeted for base editing (GT-AT); TRAC exon 3 SA disruption may be targeted (AG-AA); B2M exon 1 SD at C6 position may be disrupted by base editing (GT-AT); B2M exon 3 SA at C6 can be targeted (AG-AA).

[0548] In some embodiments, provided herein is an immune cell with at least one modification in one or more endogenous genes. In some embodiments, the immune cell may have at least one modification in one, two, three, four, five, six, seven, eight, nine, ten, eleven, twelve, thirteen, fourteen, fifteen, sixteen, seventeen, eighteen, nineteen, twenty or more endogenous genes. In some embodiments, the modification generates a premature stop codon in the endogenous genes. In some embodiments, the modification is a single base modification. In some embodiments, the modification is generated by base editing. The premature stop codon may be generated in an exon, an intron, or an untranslated region. In some embodiments, base editing may be used to introduce more than one STOP codon, in one or more alternative reading frames. For example, a premature STOP codon can be introduced at exon 3 C4 position of TRAC (CAA-TAA) by base editing.

[0549] In some embodiments, modification/base edits may be introduced at a 3′-UTR, for example, in a poly adenylation (poly-A) site. In some embodiments, base editing may be performed on a 5′-UTR region.

[0550] Chimeric Antigen Receptor Insertion into Immune Cell Genes

[0551] In some embodiments, a chimeric antigen receptor is inserted into the TRAC gene. This has advantages. First, because TRAC is highly expressed in immune cell, the chimeric antigen receptor will be similarly expressed when its construct is designed to insert the chimeric antigen receptor into the TRAC gene such that expression of the receptor is driven by the TRAC promoter. Second, inserting the chimeric antigen receptor into the TRAC gene will knockout TRAC expression. In some embodiments, the gene editing system described herein can be used to insert the chimeric antigen receptor into the TRAC locus. gRNAs specific for the TRAC locus can guide the gene editing system to the locus and initiate double-stranded DNA cleavage. In particular embodiments, the gRNA is used in conjunction with Cas12b. In various embodiments, the gene editing system is used in conjunction with a nucleic acid having a sequence encoding a CAR receptor. Exemplary guide RNAs are provided in the following Table 1A.

TABLE 1A

| gRNA sequence | PAM | napDNAbp | Gene Exon |
|---|---|---|---|
| GUUCUGUCUUUUGGUCAGGACAACCGUC | ATTN | BhCas 12b | TRAC KO |
| UAGCUAUAAGUGCUGCAGGGUGUGAGAA | | nuclease | gRNA 1 |
| ACUCCUAUUGCUGGACGAUGUCUCUUAC | | | (Exon 1) |
| GAGGCAUUAGCACAGAGUCUCUCAGCUG | | | |
| GUACAC | | | |
| GUUCUGUCUUUUGGUCAGGACAACCGUC | ATTN | BhCas 12b | TRAC KO |
| UAGCUAUAAGUGCUGCAGGGUGUGAGGA | | nuclease | gRNA 2 |
| AACUCCUAUUGCUGGACGAUGUCUCUUA | | | (Exon 1) |
| CGAGGCAUUAGCACACCGAUUUUGAUUC | | | |
| UCAAACA | | | |
| GUUCUGUCUUUUGGUCAGGACAACCGUC | ATTN | BhCas 12b | TRAC KO |
| UAGCUAUAAGUGCUGCAGGGUGUGAGAA | | nuclease | gRNA 3 |
| ACUCCUAUUGCUGGACGAUGUCUCUUAC | | | (Exon 1) |
| GAGGCAUUAGCACUCAAACAAAUGUGCA | | | |
| CAAAG | | | |
| GUUCUGUCUUUUGGUCAGGACAACCGUC | ATTN | BhCas 12b | TRAC KO |
| UAGCUAUAAGUGCUGCAGGGUGUGAGAA | | nuclease | gRNA 4 |
| ACUCCUAUUGCUGGACGAUGUCUCUUAC | | | (Exon 1) |
| GAGGCAUUAGCACUCAAACAAAUGUGUC | | | |
| ACAAAG | | | |
| GUUCUGUCUUUUGGUCAGGACAACCGUC | ATTN | BhCas 12b | TRAC KO |
| UAGCUAUAAGUGCUGCAGGGUGUGAGAA | | nuclease | gRNA 5 |
| ACUCCUAUUGCUGGACGAUGUCUCUUAC | | | (Exon 1) |
| GAGGCAUUAGCACUUUGAGAAUCAAAAU | | | |
| CGGUA | | | |
| GUUCUGUCUUUUGGUCAGGACAACCGUC | ATTN | BhCas 12b | TRAC KO |
| UAGCUAUAAGUGCUGCAGGGUGUGAGAA | | nuclease | gRNA 6 |
| ACUCCUAUUGCUGGACGAUGUCUCUUAC | | | (Exon 1) |
| GAGGCAUUAGCACUGAUGUGUAUAUCAC | | | |
| AGACAA | | | |
| GUUCUGUCUUUUGGUCAGGACAACCGUC | ATTN | BhCas 12b | TRAC KO |
| UAGCUAUAAGUGCUGCAGGGUGUGAGAA | | nuclease | gRNA 7 |
| ACUCCUAUUGCUGGACGAUGUCUCUUAC | | | (Exon 1) |
| GAGGCAUUAGCAGUUGCUCCAGGCCACA | | | |
| GCAU | | | |
| GUUCUGUCUUUUGGUCAGGACAACCGUC | ATTN | BhCas 12b | TRAC KO |
| UAGCUAUAAGUGCUGCAGGGUGUGAGAA | | nuclease | gRNA 8 |
| ACUCCUAUUGCUGGACGAUGUCUCUUAC | | | (Exon 1) |
| GAGGCAUUAGCACUUCCAGAAGACACCU | | | |
| UCUUCC | | | |
| GUUCUGUCUUUUGGUCAGGACAACCGUC | ATTN | BhCas 12b | TRAC KO |
| UAGCUAUAAGUGCUGCAGGGUGUGAGAA | | nuclease | gRNA 9 |
| ACUCCUAUUGCUGGACGAUGUCUCUUAC | | | (Exon 1) |
| GAGGCAUUAGCACCAGAAGACACCUUCU | | | |
| UCCCCA | | | |
| GUUCUGUCUUUUGGUCAGGACAACCGUC | ATTN | BhCas 12b | TRAC KO |
| UAGCUAUAAGUGCUGCAGGGUGUGAGAG | | nuclease | gRNA 10 |
| AAACUCCUAUUGCUGGACGAUGUCUCUU | | | (Exon 3) |
| ACGAGGCAUUAGCACGGUUCCGAAUCCU | | | |
| CCUGA | | | |
| GUUCUGUCUUUUGGUCAGGACAACCGUC | ATTN | BhCas 12b | TRAC KO |
| UAGCUAUAAGUGCUGCAGGGUGUGAGAA | | nuclease | gRNA 11 |
| ACUCCUAUUGCUGGACGAUGUCUCUUAC | | | (Exon 3) |
| GAGGCAUUAGCACGGAACCCAAUCACUG | | | |
| ACAGGU | | | |

[0552] A DNA construct encoding the chimeric antigen receptor and nucleic acid containing extended stretches of TRAC DNA that flank the gRNA targeting sequences. Without being bound by theory, the construct binds to the complementary TRAC sequences, and the chimeric antigen receptor DNA, residing in proximity to the TRAC sequences on the construct is then inserted at the site of the lesion, effectively knocking out the TRAC gene and knocking in the chimeric antigen receptor nucleic acid. Table 1 provides guide RNAs for the TRAC gene that can guide the base editing machinery to the TRAC locus, which enables insertion of the chimeric antigen receptor nucleic acid. The first 11 gRNAS are for BhCas12b nuclease. The second set of 11 are for the BvCas12b nuclease. These are all for inserting the CAR at TRAC by creating a double stranded break, and not for base editing.

TABLE 1B
TRAC guide RNAs

| Guide RNA Target | Guide RNA Spacer | Gene Exon |
|---|---|---|
| GTTCTGTCTTTTGGTCAGG | GUUCUGUCUUUUGGUCAG | TRAC KO |
| ACAACCGTCTAGCTATAAG | GACAACCGUCUAGCUAUA | gRNA 1 |
| TGCTGCAGGGTGTGAGAAA | AGUGCUGCAGGGUGUGAG | |
| CTCCTATTGCTGGACGATG | AAACUCCUAUUGCUGGAC | |
| TCTCTTACGAGGCATTAGC | GAUGUCUCUUACGAGGCA | |
| ACAGAGTCTCTCAGCTGGT | UUAGCACAGAGUCUCUCA | |
| ACA | GCUGGUACA | |
| GTTCTGTCTTTTGGTCAGG | GUUCUGUCUUUUGGUCAG | TRAC KO |
| ACAACCGTCTAGCTATAAG | GACAACCGUCUAGCUAUA | gRNA 2 |
| TGCTGCAGGGTGTGAGAAA | AGUGCUGCAGGGUGUGAG | |
| CTCCTATTGCTGGACGATG | AAACUCCUAUUGCUGGAC | |
| TCTCTTACGAGGCATTAGC | GAUGUCUCUUACGAGGCA | |
| ACACCGATTTTGATTCTCA | UUAGCACACCGAUUUUGA | |
| AAC | UUCUCAAAC | |
| GTTCTGTCTTTTGGTCAGG | GUUCUGUCUUUUGGUCAG | TRAC KO |
| ACAACCGTCTAGCTATAAG | GACAACCGUCUAGCUAUA | gRNA 3 |
| TGCTGCAGGGTGTGAGAAA | AGUGCUGCAGGGUGUGAG | |
| CTCCTATTGCTGGACGATG | AAACUCCUAUUGCUGGAC | |
| TCTCTTACGAGGCATTAGC | GAUGUCUCUUACGAGGCA | |
| ACTGATTCTCAAACAAATG | UUAGCACUGAUUCUCAAA | |
| TGT | CAAAUGUGU | |
| GTTCTGTCTTTTGGTCAGG | GUUCUGUCUUUUGGUCAG | TRAC KO |
| ACAACCGTCTAGCTATAAG | GACAACCGUCUAGCUAUA | gRNA 4 |
| TGCTGCAGGGTGTGAGAAA | AGUGCUGCAGGGUGUGAG | |
| CTCCTATTGCTGGACGATG | AAACUCCUAUUGCUGGAC | |
| TCTCTTACGAGGCATTAGC | GAUGUCUCUUACGAGGCA | |
| ACTCAAACAAATGTGTCAC | UUAGCACUCAAACAAAUG | |
| AAA | UGUCACAAA | |
| GTTCTGTCTTTTGGTCAGG | GUUCUGUCUUUUGGUCAG | TRAC KO |
| ACAACCGTCTAGCTATAAG | GACAACCGUCUAGCUAUA | gRNA 5 |
| TGCTGCAGGGTGTGAGAAA | AGUGCUGCAGGGUGUGAG | |
| CTCCTATTGCTGGACGATG | AAACUCCUAUUGCUGGAC | |
| TCTCTTACGAGGCATTAGC | GAUGUCUCUUACGAGGCA | |
| ACGTTTGAGAATCAAAATC | UUAGCACGUUUGAGAAUC | |
| GGT | AAAAUCGGU | |
| GTTCTGTCTTTTGGTCAGG | GUUCUGUCUUUUGGUCAG | TRAC KO |
| ACAACCGTCTAGCTATAAG | GACAACCGUCUAGCUAUA | gRNA 6 |
| TGCTGCAGGGTGTGAGAAA | AGUGCUGCAGGGUGUGAG | |
| CTCCTATTGCTGGACGATG | AAACUCCUAUUGCUGGAC | |
| TCTCTTACGAGGCATTAGC | GAUGUCUCUUACGAGGCA | |
| ACTGATGTGTATATCACAG | UUAGCACUGAUGUGUAUA | |
| ACA | UCACAGACA | |
| GTTCTGTCTTTTGGTCAGG | GUUCUGUCUUUUGGUCAG | TRAC KO |
| ACAACCGTCTAGCTATAAG | GACAACCGUCUAGCUAUA | gRNA 7 |
| TGCTGCAGGGTGTGAGAAA | AGUGCUGCAGGGUGUGAG | |
| CTCCTATTGCTGGACGATG | AAACUCCUAUUGCUGGAC | |
| TCTCTTACGAGGCATTAGC | GAUGUCUCUUACGAGGCA | |
| ACGTTGCTCCAGGCCACAG | UUAGCACGUUGCUCCAGG | |
| CAC | CCACAGCAC | |
| GTTCTGTCTTTTGGTCAGG | GUUCUGUCUUUUGGUCAG | TRAC KO |
| ACAACCGTCTAGCTATAAG | GACAACCGUCUAGCUAUA | gRNA 8 |
| TGCTGCAGGGTGTGAGAAA | AGUGCUGCAGGGUGUGAG | |
| CTCCTATTGCTGGACGATG | AAACUCCUAUUGCUGGAC | |
| TCTCTTACGAGGCATTAGC | GAUGUCUCUUACGAGGCA | |
| ACTTCCAGAAGACACCTTC | UUAGCACUUCCAGAAGAC | |
| TTC | ACCUUCUUC | |
| GTTCTGTCTTTTGGTCAGG | GUUCUGUCUUUUGGUCAG | TRAC KO |
| ACAACCGTCTAGCTATAAG | GACAACCGUCUAGCUAUA | gRNA 9 |
| TGCTGCAGGGTGTGAGAAA | AGUGCUGCAGGGUGUGAG | |
| CTCCTATTGCTGGACGATG | AAACUCCUAUUGCUGGAC | |
| TCTCTTACGAGGCATTAGC | GAUGUCUCUUACGAGGCA | |
| ACCAGAAGACACCTTCTTC | UUAGCACCAGAAGACACC | |
| CCC | UUCUUCCCC | |
| GTTCTGTCTTTTGGTCAGG | GUUCUGUCUUUUGGUCAG | TRAC KO |
| ACAACCGTCTAGCTATAAG | GACAACCGUCUAGCUAUA | gRNA 10 |
| TGCTGCAGGGTGTGAGAAA | AGUGCUGCAGGGUGUGAG | |
| CTCCTATTGCTGGACGATG | AAACUCCUAUUGCUGGAC | |
| TCTCTTACGAGGCATTAGC | GAUGUCUCUUACGAGGCA | |
| ACGGTTCCGAATCCTCCTC | UUAGCACGGUUCCGAAUC | |
| CTG | CUCCUCCUG | |
| GTTCTGTCTTTTGGTCAGG | GUUCUGUCUUUUGGUCAG | TRAC KO |
| ACAACCGTCTAGCTATAAG | GACAACCGUCUAGCUAUA | gRNA 11 |
| TGCTGCAGGGTGTGAGAAA | AGUGCUGCAGGGUGUGAG | |
| CTCCTATTGCTGGACGATG | AAACUCCUAUUGCUGGAC | |
| TCTCTTACGAGGCATTAGC | GAUGUCUCUUACGAGGCA | |
| ACGGAACCCAATCACTGAC | UUAGCACGGAACCCAAUC | |
| AGG | ACUGACAGG | |
| GACCTATAGGGTCAATGAA | GACCUAUAGGGUCAAUGA | TRAC KO |
| TCTGTGCGTGTGCCATAAG | AUCUGUGCGUGUGCCAUA | gRNA 1 |
| TAATTAAAAATTACCCACC | AGUAAUUAAAAAUUACCC | |
| ACAGGAGCACCTGAAAACA | ACCACAGGAGCACCUGAA | |
| GGTGCTTGGCACAGAGTCT | AACAGGUGCUUGGCACAG | |
| CTCAGCTGGTACA | AGUCUCUCAGCUGGUACA | |
| GACCTATAGGGTCAATGAA | GACCUAUAGGGUCAAUGA | TRAC KO |
| TCTGTGCGTGTGCCATAAG | AUCUGUGCGUGUGCCAUA | gRNA 2 |
| TAATTAAAAATTACCCACC | AGUAAUUAAAAAUUACCC | |
| ACAGGAGCACCTGAAAACA | ACCACAGGAGCACCUGAA | |
| GGTGCTTGGCACACCGATT | AACAGGUGCUUGGCACAC | |
| TTGATTCTCAAAC | CGAUUUUGAUUCUCAAAC | |
| GACCTATAGGGTCAATGAA | GACCUAUAGGGUCAAUGA | TRAC KO |
| TCTGTGCGTGTGCCATAAG | AUCUGUGCGUGUGCCAUA | gRNA 3 |
| TAATTAAAAATTACCCACC | AGUAAUUAAAAAUUACCC | |
| ACAGGAGCACCTGAAAACA | ACCACAGGAGCACCUGAA | |
| GGTGCTTGGCACTGATTCT | AACAGGUGCUUGGCACUG | |
| CAAACAAATGTGT | AUUCUCAAACAAAUGUGU | |
| GACCTATAGGGTCAATGAA | GACCUAUAGGGUCAAUGA | TRAC KO |
| TCTGTGCGTGTGCCATAAG | AUCUGUGCGUGUGCCAUA | gRNA 4 |
| TAATTAAAAATTACCCACC | AGUAAUUAAAAAUUACCC | |
| ACAGGAGCACCTGAAAACA | ACCACAGGAGCACCUGAA | |
| GGTGCTTGGCACTCAAACA | AACAGGUGCUUGGCACUC | |
| AATGTGTCACAAA | AAACAAAUGUGUCACAAA | |
| GACCTATAGGGTCAATGAA | GACCUAUAGGGUCAAUGA | TRAC KO |
| TCTGTGCGTGTGCCATAAG | AUCUGUGCGUGUGCCAUA | gRNA 5 |
| TAATTAAAAATTACCCACC | AGUAAUUAAAAAUUACCC | |
| ACAGGAGCACCTGAAAACA | ACCACAGGAGCACCUGAA | |
| GGTGCTTGGCACGTTTGAG | AACAGGUGCUUGGCACGU | |
| AATCAAAATCGGT | UUGAGAAUCAAAAUCGGU | |
| GACCTATAGGGTCAATGAA | GACCUAUAGGGUCAAUGA | TRAC KO |
| TCTGTGCGTGTGCCATAAG | AUCUGUGCGUGUGCCAUA | gRNA 6 |
| TAATTAAAAATTACCCACC | AGUAAUUAAAAAUUACCC | |
| ACAGGAGCACCTGAAAACA | ACCACAGGAGCACCUGAA | |
| GGTGCTTGGCACTGATGTG | AACAGGUGCUUGGCACUG | |
| TATATCACAGACA | AUGUGUAUAUCACAGACA | |
| GACCTATAGGGTCAATGAA | GACCUAUAGGGUCAAUGA | TRAC KO |
| TCTGTGCGTGTGCCATAAG | AUCUGUGCUGUGUGCCAU | gRNA 7 |
| TAATTAAAAATTACCCACC | AAGUAAUUAAAAAUUACC | |
| ACAGGAGCACCTGAAAACA | CACCACAGGAGCACCUGA | |
| GGTGCTTGGCACGTTGCTC | AAACAGGUGCUUGGCACG | |
| CAGGCCACAGCAC | UUGCUCCAGGCCACAGCA | |
| | C | |
| GACCTATAGGGTCAATGAA | GACCUAUAGGGUCAAUGA | TRAC KO |
| TCTGTGCGTGTGCCATAAG | AUCUGUGCGUGUGCCAUA | gRNA 8 |
| TAATTAAAAATTACCCACC | AGUAAUUAAAAAUUACCC | |
| ACAGGAGCACCTGAAAACA | ACCACAGGAGCACCUGAA | |
| GGTGCTTGGCACTTCCAGA | AACAGGUGCUUGGCACUU | |
| AGACACCTTCTTC | CCAGAAGACACCUUCUUC | |
| GACCTATAGGGTCAATGAA | GACCUAUAGGGUCAAUGA | TRAC KO |
| TCTGTGCGTGTGCCATAAG | AUCUGUGCGUGUGCCAUA | gRNA 9 |
| TAATTAAAAATTACCCACC | AGUAAUUAAAAAUUACCC | |
| ACAGGAGCACCTGAAAACA | ACCACAGGAGCACCUGAA | |
| GGTGCTTGGCACCAGAAGA | AACAGGUGCUUGGCACCA | |
| CACCTTCTTCCCC | GAAGACACCUUCUUCCCC | |
| GACCTATAGGGTCAATGAA | GACCUAUAGGGUCAAUGA | TRAC KO |
| TCTGTGCGTGTGCCATAAG | AUCUGUGCGUGUGCCAUA | gRNA 10 |
| TAATTAAAAATTACCCACC | AGUAAUUAAAAAUUACCC | |
| ACAGGAGCACCTGAAAACA | ACCACAGGAGCACCUGAA | |
| GGTGCTTGGCACGGTTCCG | AACAGGUGCUUGGCACGG | |
| AATCCTCCTCCTG | UUCCGAAUCCUCCUCCUG | |
| GACCTATAGGGTCAATGAA | GACCUAUAGGGUCAAUGA | TRAC KO |
| TCTGTGCGTGTGCCATAAG | AUCUGUGCGUGUGCCAUA | gRNA 11 |
| TAATTAAAAATTACCCACC | AGUAAUUAAAAAUUACCC | |
| ACAGGAGCACCTGAAAACA | ACCACAGGAGCACCUGAA | |
| GGTGCTTGGCACGGAACCC | AACAGGUGCUUGGCACGG | |
| AATCACTGACAGG | AACCCAAUCACUGACAGG | |

[0553] First 11 gRNAs are for BhCas12b nuclease. Second set of 11 gRNAs are for the BvCas12b nuclease. Scaffold sequence in bold, in first instance.

[0554] In some embodiments, a nucleic acid encoding a chimeric antigen receptor of the present invention can be targeted to the TRAC locus using the BE4 base editor. In some embodiments, the chimeric antigen receptor is targeted to the TRAC locus using a CRISPR/Cas9 base editing system.

[0555] To produce the gene edits described above, immune cells are collected from a subject and contacted with two or more guide RNAs and a nucleobase editor polypeptide comprising a nucleic acid programmable DNA binding protein (napDNAbp) and a cytidine deaminase or adenosine deaminase. In some embodiments, the collected immune cells are contacted with at least one nucleic acid, wherein the at least one nucleic acid encodes two or more guide RNAs and a nucleobase editor polypeptide comprising a nucleic acid programmable DNA binding protein (napDNAbp) and a cytidine deaminase. In some embodiments, the gRNA comprises nucleotide analogs. These nucleotide analogs can inhibit degradation of the gRNA from cellular processes. Table 2 provides target sequences to be used for gRNAs.

TABLE 2
Exemplary Target Sequences

| Target | Target | | | | | |
|---|---|---|---|---|---|---|
| protein | residue | gRNA target | gRNA spacer | BE | Codon change | Residue function |
| NFATC1 | R118 | CTCGATGCGAGGACTCTCCA | CUCGAUGCGAGGACUCUCCA | BE | CGC > CAC | Calcineurin |
| | | | | | | binding |
| | I119 | TCTCGATGCGAGGACTCTCC | UCUCGAUGCGAGGACUCUCC | ABE | ATC > ACC | Calcineurin |
| | | | | | | binding |
| | E120 | CATCGAGATAACCTCGTGCT | CAUCGAGAUAACCUCGUGCU | ABE | GAG > GGG | Calcineurin |
| | | | | | | binding |
| | S172 | TGGCCGGGCTCAGGCACGAG | UGGCCGGGCUCAGGCACGAG | BE | AGC > AAC | PHOSPHORYL ATION |
| | W396 | GCCCACTGGTAGGGGTGCTG | GCCCACUGGUAGGGGUGCUG | ABE | TGG > CGG | Calcineurin |
| | | | | | | binding |
| | R439 | TGGGCTCGGTGGTGGGACTT | UGGGCUCGGUGGUGGGACUU | BE | CGA > CAA | DNA BINDING |
| | H441 | CGAGCCCACTACGAGACGGA | CGAGCCCACUACGAGACGGA | ABE | CAC > CGC | DNA BINDING |
| | Y442 | CTCGTAGTGGGCTCGGTGGT | CUCGUAGUGGGCUCGGUGGU | ABE | TAC > CAC | DNA BINDING |
| | K452 | GCCGTGAAGGCGTCGGCCGG | GCCGUGAAGGCGUCGGCCGG | ABE | AAG > GGG | DNA BINDING |
| | R540 | GTTTCTGAGTTTCAGGATTC | GUUUCUGAGUUUCAGGAUUC | BE | AGA > AAA | DNA BINDING |
| | R555 | CATCGGGAGGAAGAACACAC | CAUCGGGAGGAAGAACACAC | ABE | AGG > GGG | DNA BINDING |
| | K556 | GGAGGAAGAACACACGGGTA | GGAGGAAGAACACACGGGUA | ABE | AAG > GGG | DNA BINDING |
| | Q589 | GAGCGCTGGGCTGCATCAGA | GAGCGCUGGGCUGCAUCAGA | BE | CAG > CAT | DNA BINDING |
| NFATC2 | E114 | TGATCTCGATCCGAGGGCTC | UGAUCUCGAUCCGAGGGCUC | BE | GAG > AAA | Calcineurin |
| | | | | | | binding |
| | I115 | ACGGAGTGATCTCGATCCGA | ACGGAGUGAUCUCGAUCCGA | ABE | ATC > ACC | Calcineurin |
| | | | | | | binding |
| | R253 | GCGGAGGCATTCGTGCGCCG | GCGGAGGCAUUCGUGCGCCG | ABE | AGG > GGG | NLS |
| | S99 | GCCGCGCTCAGAAACTTCTG | GCCGCGCUCAGAAACUUCUG | BE | AGC > AAC | PHOSPHORYL ATION |
| | S107 | GGGCCTCGGGCCTGAGCCCG | GGGCCUCGGGCCUGAGCCCU | BE | TCG > TTG | PHOSPHORYL ATION |
| | S148 | CCTCGGGCTGGCGGCCACCC | CCUCGGGCUGGCGGCCACCC | BE | AGC > AAC | PHOSPHORYL ATION |
| | S236 | CCACTCGCCCGTGCCCCGTC | CCACUCGCCCGUGCCCCGUC | BE | TCG > TTG | PHOSPHORYL ATION |
| | S255 | GCATTCGTGCGCCGAGGCCT | GCAUUCGUGCGCCGAGGCCU | BE | TCG > TTG | PHOSPHORYL ATION |
| | S268 | GAGCCTCACCCCAGCGCTCC | GAGCCUCACCCCAGCGCUCC | BE | TCA > TTA | PHOSPHORYL ATION |
| | S274 | GAGGGGCTCCGGGAGCGCTG | GAGGGGCUCCGGGAGCGCUG | BE | AGC > AAC | PHOSPHORYL ATION |
| | S326 | AGGGCTGGTCTTCCACATCT | AGGGCUGGUCUUCCACAUCU | BE | AGC > AAC | PHOSPHORYL ATION |
| NFATC4 | S213 | GCGGGGAGCCCAGGCCAAAG | GCGGGGAGCCCAGGCCAAAG | ABE | TCC > CCC | PHOSPHORYL ATION |
| AKT1 | T305 | GCCACCATGAAGACCTTTTG | GCCACCAUGAAGACCUUUUG | BE | ACC > ATT | PHOSPHORYL ATION |
| | T312 | TTGCGGCACACCTGAGTACC | UUGCGGCACACCUGAGUACC | BE | ACA > ATA | PHOSPHORYL ATION |
| | S473 | GTAGGAGAACTGGGGGAAGT | GUAGGAGAACUGGGGGAAGU | ABE | TCC > CCC | PHOSPHORYL ATION |
| | Y474 | CTCCTACTCGGCCAGCGGCA | CUCCUACUCGGCCAGCGGCA | ABE | TAC > TGC | PHOSPHORYL ATION |
| AKT2 | T309 | GAAAACCTTCTGTGGGACCC | GAAAACCUUCUGUGGGACCC | BE | ACC > ATT | PHOSPHORYL ATION |
| | S474 | AGTAGGAGAACTGGGGGAAG | AGUAGGAGAACUGGGGGAAG | ABE | TCC > CCC | PHOSPHORYL ATION |
| BLIMP1 | C608 | GTTGCAAGTCTGACATTTGA | GUUGCAAGUCUGACAUUUGA | ABE | TGC > CGC | DNA BINDING |
| | (ZF2) | | | | | |
| | C608 | GTTGCAAGTCTGACATTTGA | GUUGCAAGUCUGACAUUUGA | BE | TGC > TAC | DNA BINDING |
| | (ZF2) | | | | | |
| | H621 | GAAACACTACCTGGTACACA | GAACACUACCUGGUACACA | BE | CAC > TAT | DNA BINDING |
| | (ZF2) | | | | | |
| | C636 | TGTGGCAGACCTACAGTGTA | UGUGGCAGACCUACAGUGUA | BE | TGC > TAC | DNA BINDING |
| | (ZF3) | | | | | |
| | C664 | GGGCACACCTTGCATTGGTA | GGGCACACCUUGCAUUGGUA | ABE | TGC > CGC | DNA BINDING |
| | (ZF4) | | | | | |
| | Splice | CTGCGCACCTGGCATTCATG | CUGCGCACCUGGCAUUCAUG | BE | | |
| | site 1 | | | | | |
| GCN2 | Exon | CCTACCGGTCCGCAAGCGTC | CCUACCGGUCCGCAAGUGUC | BE | | KNOCKOUT |
| kinase | 1 SD | | | | | |
| (IDO | Exon | ACTCACACATCTGGATAGGT | ACUCACACAUCUGGAUAGGU | BE | | KNOCKOUT |
| pathway) | 2 SD | | | | | |
| | Exon | GACTTACCTAGACCTTCCTG | GACUUACCUAGACCUUCCUG | BE | | KNOCKOUT |
| | 5 SD | | | | | |
| CBL-B | C373 | AATCTTACAGAGCTGAAAAG | AAUCUUACAGAGCUGAAAAG | BE | TGT > TAT | E3 UBIQUITIN |
| | | | | | | LIGASE |
| | Y665.1 | CATCATATTCTTCACTTCCA | CAUCAUAUUCUUCACUUCCA | ABE | TAT > TAC | |
| | Y665.2 | AAGAATATGATGTTCCTCCC | AAGAAUAUGAUGUUCCUCCC | ABE | TAT > TGT | |
| | K907 | CCCCTAAACCACGACCGCGC | CCCCUAAACCACGACCGCGC | ABE | AAA > GGG | |
| | R911 | TCCTGCGCGGTCGTGGTTTA | UCCUGCGCGGUCGUGGUUUA | BE | CGC > CAC | |
| SHP1 | Y377 | CCCTACTCTGTGACCAACTG | CCCUACUCUGUGACCAACUG | ABE | TAC > TGC | |
| IRF4 | R96 | CGCAGGCGCGTCTTCCAGGT | CGCAGGCGCGUCUUCCAGGU | BE | CGC > CAC | DNA BINDING |
| | R98 | GCACCGCAGGCGCGTCTTCC | GCACCGCAGGCGCGUCUUCC | BE | CGG > CAG | DNA BINDING |
| | K103 | GAACAAGAGCAATGACTTTG | GAACAAGAGCAAUGACUUUG | ABE | AAG > GGG | DNA BINDING |
| PD1 | Exon 1 | CACCTACCTAAGAACCATCC | CACCUACCUAAGAACCAUCC | BE | | KNOCKOUT |
| | STOP | | | | | |
| | Exon 2 | GGGGTTCCAGGGCCTGTCTG | GGGGUUCCAGGGCCUGUCUG | BE | | KNOCKOUT |
| | STOP | | | | | |
| TET2 | H1386 | GACTTGCACAACATGCAGAA | GACUUGCACAACAUGCAGAA | BE | CAC > TAC | DNA BINDING |
| | R1302 | TTGCCAGAAGCAAGATCCCA | UUGCCAGAAGCAAGAUCCCA | ABE | AGA > GGG | DNA BINDING |
| | S1290 | CCATGAACAACCAAAAGAGA | CCAUGAACAACCAAAAGAGA | ABE | TCA > CCA | DNA BINDING |
| SMARCA4 | T353 | TCACCCCCATCCAGAAGCCG | UCACCCCCAUCCAGAAGCCG | BE | ACC > ATT | PHOSPHORYL ATION |
| | S610 | ATCTGGCTGGTCTCGTCCAG | AUCUGGCUGGUCUCGUCCAG | BE | AGC < ATC | PHOSPHORYL ATION |
| | S613 | GATGAGCGACCTCCCGGTGA | GAUGAGCGACCUCCCGGUGA | ABE | AGC > GGC | PHOSPHORYL ATION |
| | S695 | AGACAGCGATGACGTCTCTG | AGACAGCGAUGACGUCUCUG | ABE | AGC > GGC | PHOSPHORYL ATION |
| | S699 | ACGTCTCTGAGGTGGACGCG | ACGUCUCUGAGGUGGACGCG | BE | TCT > TTT | PHOSPHORYL ATION |
| | S1452 | TTAGGGGAGAGTTTCTCGGC | UUAGGGGAGAGUUUCUCGGC | ABE | TCC > CCC | PHOSPHORYL ATION |
| | S1575 | GGAGAGTGAGGAGGAGGAAG | GGAGAGUGAGGAGGAGGAAG | ABE | AGT > GGT | PHOSPHORYL ATION |
| | S1586 | AAGGCTCCGAATCCGAATCT | AAGGCUCCGAAUCCGAAUCU | BE | TCC > TTT | PHOSPHORYL ATION |
| | S1627 | ATCGTCACTCACGACCGGCT | AUCGUCACUCACGACCGGCU | BE | AGT > AAT | PHOSPHORYL ATION |
| | S1631 | TGACAGTGAGGAGGAACAAG | UGACAGUGAGGAGGAACAAG | ABE | AGT > GGT | PHOSPHORYL ATION |
| CDK4 | P173 | CACCCGTGGTTGTTACACTC | CACCCGUGGUUGUUACACUC | BE | CCC > CTT | |
| ZAP70 | S144 | CATCAGCCAGGCCCCGCAGG | CAUCAGCCAGGCCCCGCAGG | ABE | AGC > TGC | PHOSPHORYL ATION |
| | Y292 | GGTGTATCCATCTGAGTTGA | GGUGUAUCCAUCUGAGUUGA | ABE | TAC > CAC | PHOSPHORYL ATION |
| | Y292 | GGGTGTATCCATCTGAGTTG | GGGUGUAUCCAUCUGAGUUG | ABE | TAC > CAC | PHOSPHORYL ATION |
| | R360 | GCGCAAGAAGCAGATCGACG | GCGCAAGAAGCAGAUCGACG | BE | CGC > TGC | Hypermorphic |
| | | | | | | activity |
| | Y598 | TTACTACAGCCTGGCCAGCA | UUACUACAGCCUGGCCAGCA | ABE | TAC > TGC | PHOSPHORYL ATION |

[0556] The cytidine and adenosine deaminase nucleobase editors used in this invention can act on DNA, including single stranded DNA. Methods of using them to generate modifications in target nucleobase sequences in immune cells are presented.

[0557] In certain embodiments, the fusion proteins provided herein comprise one or more features that improve the base editing activity of the fusion proteins. For example, any of the fusion proteins provided herein may comprise a Cas9 domain that has reduced nuclease activity. In some embodiments, any of the fusion proteins provided herein may have a Cas9 domain that does not have nuclease activity (dCas9), or a Cas9 domain that cuts one strand of a duplexed DNA molecule, referred to as a Cas9 nickase (nCas9). Without wishing to be bound by any particular theory, the presence of the catalytic residue (e.g., H840) maintains the activity of the Cas9 to cleave the non-edited (e.g., non-methylated) strand opposite the targeted nucleobase. Mutation of the catalytic residue (e.g., D10 to A10) prevents cleavage of the edited strand containing the targeted A residue. Such Cas9 variants can generate a single-strand DNA break (nick) at a specific location based on the gRNA-defined target sequence, leading to repair of the non-edited strand, ultimately resulting in a nucleobase change on the non-edited strand.

### Adenosine Deaminases

[0558] In some embodiments, the fusion proteins of the invention comprise an adenosine deaminase domain. In some embodiments, the adenosine deaminases provided herein are capable of deaminating adenine. In some embodiments, the adenosine deaminases provided herein are capable of deaminating adenine in a deoxyadenosine residue of DNA. The adenosine deaminase may be derived from any suitable organism (e.g., E. coli). In some embodiments, the adenine deaminase is a naturally-occurring adenosine deaminase that includes one or more mutations corresponding to any of the mutations provided herein (e.g., mutations in ecTadA). One of skill in the art will be able to identify the corresponding residue in any homologous protein, e.g., by sequence alignment and determination of homologous residues. Accordingly, one of skill in the art would be able to generate mutations in any naturally-occurring adenosine deaminase (e.g., having homology to ecTadA) that corresponds to any of the mutations described herein, e.g., any of the mutations identified in ecTadA. In some embodiments, the adenosine deaminase is from a prokaryote. In some embodiments, the adenosine deaminase is from a bacterium. In some embodiments, the adenosine deaminase is from Escherichia coli, Staphylococcus aureus, Salmonella typhi, Shewanella putrefaciens, Haemophilus influenzae, Caulobacter crescentus, or Bacillus subtilis. In some embodiments, the adenosine deaminase is from E. coli.

[0559] In one embodiment, a fusion protein of the invention comprises a wild-type TadA is linked to TadA7.10, which is linked to Cas9 nickase. In particular embodiments, the fusion proteins comprise a single TadA7.10 domain (e.g., provided as a monomer). In other embodiments, the ABE7.10 editor comprises TadA7.10 and TadA(wt), which are capable of forming heterodimers. The relevant sequences follow:

TadA (wt):
SEVEFSHEYWMRHALTLAKRAWDEREVPVGAVLVHNNRVIGEGWNRPIGR
HDPTAHAEIMALRQGGLVMQNYRLIDATLYVTLEPCVMCAGAMIHSRIGR
VVFGARDAKTGAAGSLMDVLHHPGMNHRVEITEGILADECAALLSDFFRM
RRQEIKAQKKAQSSTD
TadA7.10:
SEVEFSHEYWMRHALTLAKRARDEREVPVGAVLVLNNRVIGEGWNRAIGL
HDPTAHAEIMALRQGGLVMQNYRLIDATLYVTFEPCVMCAGAMIHSRIGR
VVFGVRNAKTGAAGSLMDVLHYPGMNHRVEITEGILADECAALLCYFFRM
PRQVFNAQKKAQSSTD

[0560] In some embodiments, the adenosine deaminase comprises an amino acid sequence that is at least 60%, at least 65%, at least 70%, at least 75%, at least 80%, at least 85%, at least 90%, at least 95%, at least 96%, at least 97%, at least 98%, at least 99%, or at least 99.5% identical to any one of the amino acid sequences set forth in any of the adenosine deaminases provided herein. It should be appreciated that adenosine deaminases provided herein may include one or more mutations (e.g., any of the mutations provided herein). The disclosure provides any deaminase domains with a certain percent identify plus any of the mutations or combinations thereof described herein. In some embodiments, the adenosine deaminase comprises an amino acid sequence that has 1, 2, 3, 4, 5, 6, 7, 8, 9, 10, 11, 12, 13, 14, 15, 16, 17, 18, 19, 20, 21, 22, 21, 24, 25, 26, 27, 28, 29, 30, 31, 32, 33, 34, 35, 36, 37, 38, 39, 40, 41, 42, 43, 44, 45, 46, 47, 48, 49, 50, or more mutations compared to a reference sequence, or any of the adenosine deaminases provided herein. In some embodiments, the adenosine deaminase comprises an amino acid sequence that has at least 5, at least 10, at least 15, at least 20, at least 25, at least 30, at least 35, at least 40, at least 45, at least 50, at least 60, at least 70, at least 80, at least 90, at least 100, at least 110, at least 120, at least 130, at least 140, at least 150, at least 160, or at least 170 identical contiguous amino acid residues as compared to any one of the amino acid sequences known in the art or described herein.

[0561] In some embodiments, the adenosine deaminase comprises a D108X mutation in the TadA reference sequence, or a corresponding mutation in another adenosine deaminase, where X indicates any amino acid other than the corresponding amino acid in the wild-type adenosine deaminase. In some embodiments, the adenosine deaminase comprises a D108G, D108N, D108V, D108A, or D108Y mutation in TadA reference sequence, or a corresponding mutation in another adenosine deaminase. It should be appreciated, however, that additional deaminases may similarly be aligned to identify homologous amino acid residues that can be mutated as provided herein.

[0562] In some embodiments, the adenosine deaminase comprises an A106X mutation in TadA reference sequence, or a corresponding mutation in another adenosine deaminase, where X indicates any amino acid other than the corresponding amino acid in the wild-type adenosine deaminase. In some embodiments, the adenosine deaminase comprises an A106V mutation in TadA reference sequence, or a corresponding mutation in another adenosine deaminase.

[0563] In some embodiments, the adenosine deaminase comprises a E155X mutation in TadA reference sequence, or a corresponding mutation in another adenosine deaminase, where the presence of X indicates any amino acid other than the corresponding amino acid in the wild-type adenosine deaminase. In some embodiments, the adenosine deaminase comprises a E155D, E155G, or E155V mutation in TadA reference sequence, or a corresponding mutation in another adenosine deaminase.

[0564] In some embodiments, the adenosine deaminase comprises a D147X mutation in TadA reference sequence, or a corresponding mutation in another adenosine deaminase, where the presence of X indicates any amino acid other than the corresponding amino acid in the wild-type adenosine deaminase. In some embodiments, the adenosine deaminase comprises a D147Y, mutation in TadA reference sequence, or a corresponding mutation in another adenosine deaminase.

[0565] It should be appreciated that any of the mutations provided herein (e.g., based on the ecTadA amino acid sequence of TadA reference sequence) may be introduced into other adenosine deaminases, such as S. aureus TadA (saTadA), or other adenosine deaminases (e.g., bacterial adenosine deaminases). It would be apparent to the skilled artisan how to are homologous to the mutated residues in ecTadA. Thus, any of the mutations identified in ecTadA may be made in other adenosine deaminases that have homologous amino acid residues. It should also be appreciated that any of the mutations provided herein may be made individually or in any combination in ecTadA or another adenosine deaminase. For example, an adenosine deaminase may contain a D108N, a A106V, a E155V, and/or a D147Y mutation in TadA reference sequence, or a corresponding mutation in another adenosine deaminase. In some embodiments, an adenosine deaminase comprises the following group of mutations (groups of mutations are separated by a “;”) in TadA reference sequence, or corresponding mutations in another adenosine deaminase: D108N and A106V; D108N and E155V; D108N and D147Y; A106V and E155V; A106V and D147Y; E155V and D147Y; D108N, A106V, and E55V; D108N, A106V, and D147Y; D108N, E55V, and D147Y; A106V, E55V, and D147Y; and D108N, A106V, E55V, and D147Y. It should be appreciated, however, that any combination of corresponding mutations provided herein may be made in an adenosine deaminase (e.g., ecTadA).

[0566] In some embodiments, the adenosine deaminase comprises one or more of a H8X, T17X, L18X, W23X, L34X, W45X, R51X, A56X, E59X, E85X, M94X, I95X, V102X, F104X, A106X, R107X, D108X, K10X, M118X, N127X, A138X, F149X, M151X, R153X, Q154X, I156X, and/or K157X mutation in TadA reference sequence, or one or more corresponding mutations in another adenosine deaminase, where the presence of X indicates any amino acid other than the corresponding amino acid in the wild-type adenosine deaminase. In some embodiments, the adenosine deaminase comprises one or more of H8Y, T17S, L18E, W23L, L34S, W45L, R51H, A56E, or A56S, E59G, E85K, or E85G, M94L, 1951, V102A, F104L, A106V, R107C, or R107H, or R107P, D108G, or D108N, or D108V, or D108A, or D108Y, Kl 101, Ml 18K, N127S, A138V, F149Y, M151V, R153C, Q154L, I156D, and/or K157R mutation in TadA reference sequence, or one or more corresponding mutations in another adenosine deaminase.

[0567] In some embodiments, the adenosine deaminase comprises one or more of H8X, D108X, and/or N127X mutation in TadA reference sequence, or one or more corresponding mutations in another adenosine deaminase, where X indicates the presence of any amino acid. In some embodiments, the adenosine deaminase comprises one or more of a H8Y, D108N, and/or N127S mutation in TadA reference sequence, or one or more corresponding mutations in another adenosine deaminase.

[0568] In some embodiments, the adenosine deaminase comprises one or more of H8X, R26X, M61X, L68X, M70X, A106X, D108X, A109X, N127X, D147X, R152X, Q154X, E155X, K161X, Q163X, and/or T166X mutation in TadA reference sequence, or one or more corresponding mutations in another adenosine deaminase, where X indicates the presence of any amino acid other than the corresponding amino acid in the wild-type adenosine deaminase. In some embodiments, the adenosine deaminase comprises one or more of H8Y, R26W, M611, L68Q, M70V, A106T, D108N, A109T, N127S, D147Y, R152C, Q154H or Q154R, E155G or E155V or E155D, K161Q, Q163H, and/or T166P mutation in TadA reference sequence, or one or more corresponding mutations in another adenosine deaminase.

[0569] In some embodiments, the adenosine deaminase comprises one, two, three, four, five, or six mutations selected from the group consisting of H8X, D108X, N127X, D147X, R152X, and Q154X in TadA reference sequence, or a corresponding mutation or mutations in another adenosine deaminase, where X indicates the presence of any amino acid other than the corresponding amino acid in the wild-type adenosine deaminase. In some embodiments, the adenosine deaminase comprises one, two, three, four, five, six, seven, or eight mutations selected from the group consisting of H8X, M61X, M70X, D108X, N127X, Q154X, E155X, and Q163X in TadA reference sequence, or a corresponding mutation or mutations in another adenosine deaminase, where X indicates the presence of any amino acid other than the corresponding amino acid in the wild-type adenosine deaminase. In some embodiments, the adenosine deaminase comprises one, two, three, four, or five, mutations selected from the group consisting of H8X, D108X, N127X, E155X, and T166X in TadA reference sequence, or a corresponding mutation or mutations in another adenosine deaminase, where X indicates the presence of any amino acid other than the corresponding amino acid in the wild-type adenosine deaminase. In some embodiments, the adenosine deaminase comprises one, two, three, four, five, or six mutations selected from the group consisting of H8X, A106X, and D108X, or a corresponding mutation or mutations in another adenosine deaminase, where X indicates the presence of any amino acid other than the corresponding amino acid in the wild-type adenosine deaminase. In some embodiments, the adenosine deaminase comprises one, two, three, four, five, six, or seven mutations selected from the group consisting of H8X, R126X, L68X, D108X, N127X, D147X, and E155X in TadA reference sequence, or a corresponding mutation or mutations in another adenosine deaminase, where X indicates the presence of any amino acid other than the corresponding amino acid in the wild-type adenosine deaminase. In some embodiments, the adenosine deaminase comprises one, two, three, four, or five mutations selected from the group consisting of H8X, D108X, A109X, N127X, and E155X in TadA reference sequence, or a corresponding mutation or mutations in another adenosine deaminase, where X indicates the presence of any amino acid other than the corresponding amino acid in the wild-type adenosine deaminase.

[0570] In some embodiments, the adenosine deaminase comprises one, two, three, four, five, or six mutations selected from the group consisting of H8Y, D108N, N127S, D147Y, R152C, and Q154H in TadA reference sequence, or a corresponding mutation or mutations in another adenosine deaminase. In some embodiments, the adenosine deaminase comprises one, two, three, four, five, six, seven, or eight mutations selected from the group consisting of H8Y, M611, M70V, D108N, N127S, Q154R, E155G, and Q163H in TadA reference sequence, or a corresponding mutation or mutations in another adenosine deaminase. In some embodiments, the adenosine deaminase comprises one, two, three, four, or five mutations selected from the group consisting of H8Y, D108N, N127S, E155V, and T166P in TadA reference sequence, or a corresponding mutation or mutations in another adenosine deaminase. In some embodiments, the adenosine deaminase comprises one, two, three, four, five, or six mutations selected from the group consisting of H8Y, A106T, D108N, N127S, E155D, and K161Q in TadA reference sequence, or a corresponding mutation or mutations in another adenosine deaminase. In some embodiments, the adenosine deaminase comprises one, two, three, four, five, six, or seven mutations selected from the group consisting of H8Y, R126W, L68Q, D108N, N127S, D147Y, and E155V in TadA reference sequence, or a corresponding mutation or mutations in another adenosine deaminase. In some embodiments, the adenosine deaminase comprises one, two, three, four, or five mutations selected from the group consisting of H8Y, D108N, A109T, N127S, and E155G in TadA reference sequence, or a corresponding mutation or mutations in another adenosine deaminase.

[0571] In some embodiments, the adenosine deaminase comprises one or more of the or one or more corresponding mutations in another adenosine deaminase. In some embodiments, the adenosine deaminase comprises a D108N, D108G, or D108V mutation in TadA reference sequence, or corresponding mutations in another adenosine deaminase. In some embodiments, the adenosine deaminase comprises a A106V and D108N mutation in TadA reference sequence, or corresponding mutations in another adenosine deaminase. In some embodiments, the adenosine deaminase comprises R107C and D108N mutations in TadA reference sequence, or corresponding mutations in another adenosine deaminase. In some embodiments, the adenosine deaminase comprises a H8Y, D108N, N127S, D147Y, and Q154H mutation in TadA reference sequence, or corresponding mutations in another adenosine deaminase. In some embodiments, the adenosine deaminase comprises a H8Y, R24W, D108N, N127S, D147Y, and E155V mutation in TadA reference sequence, or corresponding mutations in another adenosine deaminase. In some embodiments, the adenosine deaminase comprises a D108N, D147Y, and E155V mutation in TadA reference sequence, or corresponding mutations in another adenosine deaminase. In some embodiments, the adenosine deaminase comprises a H8Y, D108N, and N127S mutation in TadA reference sequence, or corresponding mutations in another adenosine deaminase. In some embodiments, the adenosine deaminase comprises a A106V, D108N, D147Y, and E155V mutation in TadA reference sequence, or corresponding mutations in another adenosine deaminase.

[0572] In some embodiments, the adenosine deaminase comprises one or more of S2X, H8X, 149X, L84X, H123X, N127X, I156X, and/or K160X mutation in TadA reference sequence, or one or more corresponding mutations in another adenosine deaminase, where the presence of X indicates any amino acid other than the corresponding amino acid in the wild-type adenosine deaminase. In some embodiments, the adenosine deaminase comprises one or more of S2A, H8Y, 149F, L84F, H123Y, N127S, I156F, and/or K160S mutation in TadA reference sequence, or one or more corresponding mutations in another adenosine deaminase.

[0573] In some embodiments, the adenosine deaminase comprises an L84X mutation adenosine deaminase, where X indicates any amino acid other than the corresponding amino acid in the wild-type adenosine deaminase. In some embodiments, the adenosine deaminase comprises an L84F mutation in TadA reference sequence, or a corresponding mutation in another adenosine deaminase.

[0574] In some embodiments, the adenosine deaminase comprises an H123X mutation in TadA reference sequence, or a corresponding mutation in another adenosine deaminase, where X indicates any amino acid other than the corresponding amino acid in the wild-type adenosine deaminase. In some embodiments, the adenosine deaminase comprises an H123Y mutation in TadA reference sequence, or a corresponding mutation in another adenosine deaminase.

[0575] In some embodiments, the adenosine deaminase comprises an 1157X mutation in TadA reference sequence, or a corresponding mutation in another adenosine deaminase, where X indicates any amino acid other than the corresponding amino acid in the wild-type adenosine deaminase. In some embodiments, the adenosine deaminase comprises an I157F mutation in TadA reference sequence, or a corresponding mutation in another adenosine deaminase.

[0576] In some embodiments, the adenosine deaminase comprises one, two, three, four, five, six, or seven mutations selected from the group consisting of L84X, A106X, D108X, H123X, D147X, E155X, and I156X in TadA reference sequence, or a corresponding mutation or mutations in another adenosine deaminase, where X indicates the presence of any amino acid other than the corresponding amino acid in the wild-type adenosine deaminase. In some embodiments, the adenosine deaminase comprises one, two, three, four, five, or six mutations selected from the group consisting of S2X, I49X, A106X, D108X, D147X, and E155X in TadA reference sequence, or a corresponding mutation or mutations in another adenosine deaminase, where X indicates the presence of any amino acid other than the corresponding amino acid in the wild-type adenosine deaminase. In some embodiments, the adenosine deaminase comprises one, two, three, four, or five mutations selected from the group consisting of H8X, A106X, D108X, N127X, and K160X in TadA reference sequence, or a corresponding mutation or mutations in another adenosine deaminase, where X indicates the presence of any amino acid other than the corresponding amino acid in the wild-type adenosine deaminase.

[0577] In some embodiments, the adenosine deaminase comprises one, two, three, four, five, six, or seven mutations selected from the group consisting of L84F, A106V, D108N, H123Y, D147Y, E155V, and I156F in TadA reference sequence, or a corresponding mutation or mutations in another adenosine deaminase. In some embodiments, the adenosine deaminase comprises one, two, three, four, five, or six mutations selected from the group consisting of S2A, I49F, A106V, D108N, D147Y, and E155V in TadA reference sequence.

[0578] In some embodiments, the adenosine deaminase comprises one, two, three, four, or five mutations selected from the group consisting of H8Y, A106T, D108N, N127S, and K160S in TadA reference sequence, or a corresponding mutation or mutations in another adenosine deaminase.

[0579] In some embodiments, the adenosine deaminase comprises one or more of a E25X, R26X, R107X, A142X, and/or A143X mutation in TadA reference sequence, or one or more corresponding mutations in another adenosine deaminase, where the presence of X indicates any amino acid other than the corresponding amino acid in the wild-type adenosine deaminase. In some embodiments, the adenosine deaminase comprises one or more of E25M, E25D, E25A, E25R, E25V, E25S, E25Y, R26G, R26N, R26Q, R26C, R26L, R26K, R107P, R07K, R107A, R107N, R107W, R107H, R107S, A142N, A142D, A142G, A143D, A143G, A143E, A143L, A143W, A143M, A143S, A143Q, and/or A143R mutation in TadA reference sequence, or one or more corresponding mutations in another adenosine deaminase. In some embodiments, the adenosine deaminase comprises one or more of the mutations described herein corresponding to TadA reference sequence, or one or more corresponding mutations in another adenosine deaminase.

[0580] In some embodiments, the adenosine deaminase comprises an E25X mutation in TadA reference sequence, or a corresponding mutation in another adenosine deaminase, where X indicates any amino acid other than the corresponding amino acid in the wild-type adenosine deaminase. In some embodiments, the adenosine deaminase comprises an E25M, E25D, E25A, E25R, E25V, E25S, or E25Y mutation in TadA reference sequence, or a corresponding mutation in another adenosine deaminase.

[0581] In some embodiments, the adenosine deaminase comprises an R26X mutation in TadA reference sequence, or a corresponding mutation in another adenosine deaminase, where X indicates any amino acid other than the corresponding amino acid in the wild-type adenosine deaminase. In some embodiments, the adenosine deaminase comprises R26G, R26N, R26Q, R26C, R26L, or R26K mutation in TadA reference sequence, or a corresponding mutation in another adenosine deaminase.

[0582] In some embodiments, the adenosine deaminase comprises an R107X mutation in TadA reference sequence, or a corresponding mutation in another adenosine deaminase, where X indicates any amino acid other than the corresponding amino acid in the wild-type adenosine deaminase. In some embodiments, the adenosine deaminase comprises an R107P, R07K, R107A, R107N, R107W, R107H, or R107S mutation in TadA reference sequence, or a corresponding mutation in another adenosine deaminase.

[0583] In some embodiments, the adenosine deaminase comprises an A142X mutation in TadA reference sequence, or a corresponding mutation in another adenosine deaminase, where X indicates any amino acid other than the corresponding amino acid in the wild-type adenosine deaminase. In some embodiments, the adenosine deaminase comprises an A142N, A142D, A142G, mutation in TadA reference sequence, or a corresponding mutation in another adenosine deaminase.

[0584] In some embodiments, the adenosine deaminase comprises an A143X mutation in TadA reference sequence, or a corresponding mutation in another adenosine deaminase, where X indicates any amino acid other than the corresponding amino acid in the wild-type adenosine deaminase. In some embodiments, the adenosine deaminase comprises an A143D, A143G, A143E, A143L, A143W, A143M, A143S, A143Q, and/or A143R mutation in TadA reference sequence, or a corresponding mutation in another adenosine deaminase.

[0585] In some embodiments, the adenosine deaminase comprises one or more of a H36X, N37X, P48X, 149X, R51X, M70X, N72X, D77X, E134X, S146X, Q154X, K157X, and/or K161X mutation in TADA reference sequence, or one or more corresponding mutations in another adenosine deaminase, where the presence of X indicates any amino acid other than the corresponding amino acid in the wild-type adenosine deaminase. In some embodiments, the adenosine deaminase comprises one or more of H36L, N37T, N37S, P48T, P48L, 149V, R51H, R51L, M70L, N72S, D77G, E134G, S146R, S146C, Q154H, K157N, and/or K161T mutation in TadA reference sequence, or one or more corresponding mutations in another adenosine deaminase.

[0586] In some embodiments, the adenosine deaminase comprises an H36X mutation in TadA reference sequence, or a corresponding mutation in another adenosine deaminase, where X indicates any amino acid other than the corresponding amino acid in the wild-type adenosine deaminase. In some embodiments, the adenosine deaminase comprises an H36L mutation in TadA reference sequence, or a corresponding mutation in another adenosine deaminase.

[0587] In some embodiments, the adenosine deaminase comprises an N37X mutation in TadA reference sequence, or a corresponding mutation in another adenosine deaminase, where X indicates any amino acid other than the corresponding amino acid in the wild-type adenosine deaminase. In some embodiments, the adenosine deaminase comprises an N37T or N37S mutation in TadA reference sequence, or a corresponding mutation in another adenosine deaminase.

[0588] In some embodiments, the adenosine deaminase comprises an P48X mutation in TadA reference sequence, or a corresponding mutation in another adenosine deaminase, where X indicates any amino acid other than the corresponding amino acid in the wild-type adenosine deaminase. In some embodiments, the adenosine deaminase comprises an P48T or P48L mutation in TadA reference sequence, or a corresponding mutation in another adenosine deaminase.

[0589] In some embodiments, the adenosine deaminase comprises an R51X mutation in TadA reference sequence, or a corresponding mutation in another adenosine deaminase, where X indicates any amino acid other than the corresponding amino acid in the wild-type adenosine deaminase. In some embodiments, the adenosine deaminase comprises an R51H or R51L mutation in TadA reference sequence, or a corresponding mutation in another adenosine deaminase.

[0590] In some embodiments, the adenosine deaminase comprises an S146X mutation in TadA reference sequence, or a corresponding mutation in another adenosine deaminase, where X indicates any amino acid other than the corresponding amino acid in the wild-type adenosine deaminase. In some embodiments, the adenosine deaminase comprises an S146R or S146C mutation in TadA reference sequence, or a corresponding mutation in another adenosine deaminase.

[0591] In some embodiments, the adenosine deaminase comprises an K157X mutation in TadA reference sequence, or a corresponding mutation in another adenosine deaminase, where X indicates any amino acid other than the corresponding amino acid in the wild-type adenosine deaminase. In some embodiments, the adenosine deaminase comprises a K157N mutation in TadA reference sequence, or a corresponding mutation in another adenosine deaminase.

[0592] In some embodiments, the adenosine deaminase comprises an P48X mutation in TadA reference sequence, or a corresponding mutation in another adenosine deaminase, where X indicates any amino acid other than the corresponding amino acid in the wild-type adenosine deaminase. In some embodiments, the adenosine deaminase comprises a P48S, P48T, or P48A mutation in TadA reference sequence, or a corresponding mutation in another adenosine deaminase.

[0593] In some embodiments, the adenosine deaminase comprises an A142X mutation in TadA reference sequence, or a corresponding mutation in another adenosine deaminase, where X indicates any amino acid other than the corresponding amino acid in the wild-type adenosine deaminase. In some embodiments, the adenosine deaminase comprises a A142N mutation in TadA reference sequence, or a corresponding mutation in another adenosine deaminase.

[0594] In some embodiments, the adenosine deaminase comprises an W23X mutation in TadA reference sequence, or a corresponding mutation in another adenosine deaminase, where X indicates any amino acid other than the corresponding amino acid in the wild-type adenosine deaminase. In some embodiments, the adenosine deaminase comprises a W23R or W23L mutation in TadA reference sequence, or a corresponding mutation in another adenosine deaminase.

[0595] In some embodiments, the adenosine deaminase comprises an R152X mutation in TadA reference sequence, or a corresponding mutation in another adenosine deaminase, where X indicates any amino acid other than the corresponding amino acid in the wild-type adenosine deaminase. In some embodiments, the adenosine deaminase comprises a R152P or R52H mutation in TadA reference sequence, or a corresponding mutation in another adenosine deaminase.

[0596] In one embodiment, the adenosine deaminase may comprise the mutations H36L, R51L, L84F, A106V, D108N, H123Y, S146C, D147Y, E155V, I156F, and K157N. In some embodiments, the adenosine deaminase comprises the following combination of mutations relative to TadA reference sequence, where each mutation of a combination is separated by a “_” and each combination of mutations is between parentheses: (A106V_D108N),

### (R107C_D108N),

### (H8Y_D108N_S127S_D147Y_Q154H), (H8Y_R24W_D108N_N127S_D147Y_E155V),

### (D108N_D147Y_E155V), (H8Y_D108N_S127S), (H8Y_D108N_N127S_D147Y_Q154H),

### (A106V_D108N_D147Y_E155V) (D108Q_D147Y_E155V) (D108M_D147Y_E155V),

### (D108L_D147Y_E155V), (D108K_D147Y_E155V), (D1081_D147Y_E155V),

### (D108F_D147Y_E155V), (A106V_D108N_D147Y), (A106V_D108M_D147Y_E155V),

[0597] (E59A_A106V_D108N_D147Y_E155V), (E59A cat dead_A106V_D108N_D147Y_E155V),

### (L84F_A106V_D108N_H123Y_D147Y_E155V_I156Y),

### (L84F_A106V_D108N_H123Y_D147Y_E155V_I156F), (D103A_D014N),

### (G22P_D103A_D104N), (G22P_D103A_D104N_S138A), (D103A_D104N_S138A),

### (R26G_L84F_A106V_R107H_D108N_H123Y_A 142N_A143D_D147Y_E155V_I156F),

### (E25G_R26G_L84F_A106V_R107H_D108N_H123Y_A142N_A143D_D147Y_E155V_I156F), (E25D_R26G_L84F_A106V_R107K_D108N_H123Y_A142N_A143G_D147Y_E155V_I156F), (R26Q_L84F_A106V_D108N_H123Y_A142N_D147Y_E155V_I156F),

### (E25M_R26G_L84F_A106V_R107P_D108N_H123Y_A142N_A143D_D147Y_E155V_I156F), (R26C_L84F_A106V_R107H_D108N_H123Y_A142N_D147Y_E155V_I156F),

### (L84F_A106V_D108N_H123Y_A142N_A143L_D147Y_E155V_I156F),

### (R26G_L84F_A106V_D108N_H123Y_A142N_D147Y_E155V_I156F),

### (E25A_R26G_L84F_A106V_R107N_D108N_H123Y_A142N_A143E_D147Y_E155V_I156F),

### (R26G_L84F_A106V_R107H_D108N_H123Y_A 142N_A143D_D147Y_E155V_I156F),

### (A106V_D108N_A142N_D147Y_E155V), (R26G_A106V_D108N_A142N_D147Y_E155V),

### (E25D_R26G_A106V_R107K_D108N_A142N_A143G_D147Y_E155V),

### (R26G_A106V_D108N_R107H_A142N_A143D_D147Y_E155V),

### (E25D_R26G_A106V_D108N_A142N_D147Y_E155V),

### (A106V_R107K_D108N_A142N_D147Y_E155V),

### (A106V_D108N_A142N_A143G_D147Y_E155V),

### (A106V_D108N_A142N_A143L_D147Y_E155V),

### (H36L_R51L_L84F_A106V_D108N_H123Y_S146C_D147Y_E155V_I156F_K157N),

### (N37T_P48T_M70L_L84F_A106V_D108N_H123Y_D147Y_I49V_E155V_I156F),

### (N37S_L84F_A106V_D108N_H123Y_D147Y_E155V_I156F_K161T),

### (H36L_L84F_A 106V_D108N_H123Y_D147Y_Q154H_E155V_I156F),

### (N72S_L84F_A106V_D108N_H123Y_S146R_D147Y_E155V_I156F),

### (H36L_P48L_L84F_A106V_D108N_H123Y_E134G_D147Y_E155V_I156F_K157N),

### (H36L_L84F_A 106V_D108N_H123Y_S146C_D147Y_E155V_I156F),

### (L84F_A106V_D108N_H123Y_S146R_D147Y_E155V_I156F_K161T),

### (N37S_R51H_D77G_L84F_A106V_D108N_H123Y_D147Y_E155V_I156F),

### (R51L_L84F_A106V_D108N_H123Y_D147Y_E155V_I156F_K157N),

### (D24G_Q71R_L84F_H96L_A106V_D108N_H123Y_D147Y_E155V_I156F_K160E),

### (H36L_G67V_L84F_A106V_D108N_H123Y_S146T_D147Y_E155V_I156F),

### (Q71L_L84F_A 106V_D108N_H123Y_L137M_A143E_D147Y_E155V_I156F),

### (E25G_L84F_A 106V_D108N_H123Y_D147Y_E155V_I156F_Q159L),

### (L84F_A91T_F104I_A106V_D108N_H123Y_D147Y_E155V_I156F),

### (N72D_L84F_A106V_D108N_H123Y_G125A_D147Y_E155V_I156F),

### (P48S_L84F_S97C_A106V_D108N_H123Y_D147Y_E155V_I156F),

### (W23G_L84F_A106V_D108N_H123Y_D147Y_E155V_I156F),

### (D24G_P48L_Q71R_L84F_A106V_D108N_H123Y_D147Y_E155V_I156F_Q159L),

### (L84F_A106V_D108N_H123Y_A142N_D147Y_E155V_I156F),

### (H36L_R51L_L84F_A106V_D108N_H123Y_A142N_S146C_D147Y_E155V_I156F_K157N),

### (N37S_L84F_A106V_D108N_H123Y_A142N_D147Y_E155V_I156F_K161T),

### (L84F_A106V_D108N_D147Y_E155V_I156F),

### (R51L_L84F_A106V_D108N_H123Y_S146C_D147Y_E155V_I156F_K157N_K161T),

### (L84F_A106V_D108N_H123Y_S146C_D147Y_E155V_I156F_K161T),

### (L84F_A106V_D108N_H123Y_S146C_D147Y_E155V_I156F_K157N_K160E_K161T),

### (L84F_A106V_D108N_H123Y_S146C_D147Y_E155V_I156F_K157N_K160E),

### (R74Q_L84F_A106V_D108N_H123Y_D147Y_E155V_I156F),

### (R74A_L84F_A106V_D108N_H123Y_D147Y_E155V_I156F),

### (L84F_A106V_D108N_H123Y_D147Y_E155V_I156F),

### (R74Q_L84F_A106V_D108N_H123Y_D147Y_E155V_I156F),

### (L84F_R98Q_A106V_D108N_H123Y_D147Y_E155V_I156F),

### (L84F_A106V_D108N_H123Y_R129Q_D147Y_E155V_I156F),

### (P48S_L84F_A106V_D108N_H123Y_A142N_D147Y_E155V_I156F), (P48S_A142N),

### (P48T_I49V_L84F_A106V_D108N_H123Y_A142N_D147Y_E155V_I156F_L157N),

### (P48T_I49V_A142N), (H36L_P48S_R51L_L84F_A106V_D108N_H123Y_S146C_D147Y_E155V_I156F_K157N),

### (H36L_P48S_R51L_L84F_A106V_D108N_H123Y_S146C_A142N_D147Y_E155V_I156F

### (H36L_P48T_I49V_R51L_L84F_A106V_D108N_H123Y_S146C_D147Y_E155V_I156F_K157N), (H36L_P48T_I49V_R51L_L84F_A106V_D108N_H123Y_A142N_S146C_D147 Y_E155V_I156F_K157N),

### (H36L_P48A_R51L_L84F_A106V_D108N_H123Y_S146C_D147Y_E155V_I156F_K157N),

### (H36L_P48A_R51L_L84F_A106V_D108N_H123Y_A142N_S146C_D147Y_E155V_I156F_K157N),

### (H36L_P48A_R51L_L84F_A106V_D108N_H123Y_S146C_A142N_D147Y_E155V_I156F_K157N),

### (W23L_H36L_P48A_R51L_L84F_A106V_D108N_H123Y_S146C_D147Y_E155V_I156F_K157N),

### (W23R_H36L_P48A_R51L_L84F_A106V_D108N_H123Y_S146C_D147Y_E155V_I156F_K157N),

### (W23L_H36L_P48A_R51L_L84F_A106V_D108N_H123Y_S146R_D147Y_E155V_I156F_K161T),

### (H36L_P48A_R51L_L84F_A106V_D108N_H123Y_S146C_D147Y_R152H_E155V_I156F_K157N),

### (H36L_P48A_R51L_L84F_A106V_D108N_H123Y_S146C_D147Y_R152P_E155V_I156F_K157N),

### (W23L_H36L_P48A_R51L_L84F_A106V_D108N_H123Y_S146C_D147Y_R152P_E155V_I156F_K157N),

### (W23L_H36L_P48A_R51L_L84F_A106V_D108N_H123Y_A142A_S146C_D147Y_E155V_I156F_K157N),

### (W23L_H36L_P48A_R51L_L84F_A106V_D108N_H123Y_A142A_S146C_D147Y_R152P_E155V_I156F_K157N),

### (W23L_H36L_P48A_R51L_L84F_A106V_D108N_H123Y_S146R_D147Y_E155V_I156F_K161T),

### (W23R_H36L_P48A_R51L_L84F_A106V_D108N_H123Y_S146C_D147Y_R152P_E155V_I156F_K157N),

### (H36L_P48A_R51L_L84F_A106V_D108N_H123Y_A142N_S146C_D147Y_R152P_E155V_I156F_K157N).

### Cytidine Deaminase

[0598] In addition to adenosine deaminase, the fusion proteins of the invention comprise one or more cytidine deaminases. In some embodiments, the cytidine deaminases provided herein are capable of deaminating cytosine or 5-methylcytosine to uracil or thymine. In some embodiments, the cytidine deaminases provided herein are capable of deaminating cytosine in DNA. The cytidine deaminase may be derived from any suitable organism. In some embodiments, the cytidine deaminase is a naturally-occurring cytidine deaminase that includes one or more mutations corresponding to any of the mutations provided herein. One of skill in the art will be able to identify the corresponding residue in any homologous protein, e.g., by sequence alignment and determination of homologous residues. Accordingly, one of skill in the art would be able to generate mutations in any naturally-occurring cytidine deaminase that corresponds to any of the mutations described herein. In some embodiments, the cytidine deaminase is from a prokaryote. In some embodiments, the cytidine deaminase is from a bacterium. In some embodiments, the cytidine deaminase is from a mammal (e.g., human).

[0599] In some embodiments, the cytidine deaminase comprises an amino acid sequence that is at least 60%, at least 65%, at least 70%, at least 75%, at least 80%, at least 85%, at least 90%, at least 95%, at least 96%, at least 97%, at least 98%, at least 99%, or at least 99.5% identical to any one of the cytidine deaminase amino acid sequences set forth herein. It should be appreciated that cytidine deaminases provided herein may include one or more mutations (e.g., any of the mutations provided herein). Some embodiments provide a polynucleotide molecule encoding the cytidine deaminase nucleobase editor polypeptide of any previous aspect or as delineated herein. In some embodiments, the polynucleotide is codon optimized.

[0600] The disclosure provides any deaminase domains with a certain percent identity plus any of the mutations or combinations thereof described herein. In some embodiments, the cytidine deaminase comprises an amino acid sequence that has 1, 2, 3, 4, 5, 6, 7, 8, 9, 10, 11, 12, 13, 14, 15, 16, 17, 18, 19, 20, 21, 22, 21, 24, 25, 26, 27, 28, 29, 30, 31, 32, 33, 34, 35, 36, 37, 38, 39, 40, 41, 42, 43, 44, 45, 46, 47, 48, 49, 50, or more mutations compared to a reference sequence, or any of the cytidine deaminases provided herein. In some embodiments, the cytidine deaminase comprises an amino acid sequence that has at least 5, at least 10, at least 15, at least 20, at least 25, at least 30, at least 35, at least 40, at least 45, at least 50, at least 60, at least 70, at least 80, at least 90, at least 100, at least 110, at least 120, at least 130, at least 140, at least 150, at least 160, or at least 170 identical contiguous amino acid residues as compared to any one of the amino acid sequences known in the art or described herein.

[0601] A fusion protein of the invention second protein comprises two or more nucleic acid editing domains. In some embodiments, the nucleic acid editing domain can catalyze a C to U base change. In some embodiments, the nucleic acid editing domain is a deaminase domain. In some embodiments, the deaminase is a cytidine deaminase. In some embodiments, the deaminase is an apolipoprotein B mRNA-editing complex (APOBEC) family deaminase. In some embodiments, the deaminase is an APOBEC1 deaminase. In some embodiments, the deaminase is an APOBEC2 deaminase. In some embodiments, the deaminase is an APOBEC3 deaminase. In some embodiments, the deaminase is an APOBEC3 A deaminase. In some embodiments, the deaminase is an APOBEC3B deaminase. In some embodiments, the deaminase is an APOBEC3C deaminase. In some embodiments, the deaminase is an APOBEC3D deaminase. In some embodiments, the deaminase is an APOBEC3E deaminase. In some embodiments, the deaminase is an APOBEC3F deaminase. In some embodiments, the deaminase is an APOBEC3G deaminase. In some embodiments, the deaminase is an APOBEC3H deaminase. In some embodiments, the deaminase is an APOBEC4 deaminase. In some embodiments, the deaminase is an activation-induced deaminase (AID). In some embodiments, the deaminase is a vertebrate deaminase. In some embodiments, the deaminase is an invertebrate deaminase. In some embodiments, the deaminase is a human, chimpanzee, gorilla, monkey, cow, dog, rat, or mouse deaminase. In some embodiments, the deaminase is a human deaminase. In some embodiments, the deaminase is a rat deaminase, e.g., rAPOBEC1. In some embodiments, the deaminase is a Petromyzon marinus cytidine deaminase 1 (pmCDA1). In some embodiments, the deminase is a human APOBEC3G. In some embodiments, the deaminase is a fragment of the human APOBEC3G. In some embodiments, the deaminase is a human APOBEC3G variant comprising a D316R D317R mutation. In some embodiments, the deaminase is a fragment of the human APOBEC3G and comprising mutations corresponding to the D316R D317R mutations. In some embodiments, the nucleic acid editing domain is at least 80%, at least 85%, at least 90%, at least 92%, at least 95%, at least 96%, at least 97%, at least 98%, at least 99%), or at least 99.5% identical to the deaminase domain of any deaminase described herein.

[0602] In certain embodiments, the fusion proteins provided herein comprise one or more features that improve the base editing activity of the fusion proteins. For example, any of the fusion proteins provided herein may comprise a Cas9 domain that has reduced nuclease activity. In some embodiments, any of the fusion proteins provided herein may have a Cas9 domain that does not have nuclease activity (dCas9), or a Cas9 domain that cuts one strand of a duplexed DNA molecule, referred to as a Cas9 nickase (nCas9).

### Cas9 Domains of Nucleobase Editors

[0603] In some aspects, a nucleic acid programmable DNA binding protein (napDNAbp) is selected from the group consisting of Cas9, CasX, CasY, Cpf1, Cas12b/C2c1, and Cas12c/C2c3, or active fragments thereof. In another embodiment, the napDNAbp domain comprises a catalytic domain capable of cleaving the reverse complement strand of the nucleic acid sequence. In another embodiment, the napDNAbp domain does not comprise a catalytic domain capable of cleaving the nucleic acid sequence. In another embodiment, the Cas9 is dCas9 or nCas9. In another embodiment, the napDNAbp comprises a nucleobase editor.

[0604] In some embodiments, a nucleic acid programmable DNA binding protein (napDNAbp) is a Cas9 domain. Non-limiting, exemplary Cas9 domains are provided herein. The Cas9 domain may be a nuclease active Cas9 domain, a nuclease inactive Cas9 domain (a nuclease dead Cas9, or dCas9), or a Cas9 nickase (nCas9). In some embodiments, the Cas9 domain is a nuclease active domain. For example, the Cas9 domain may be a Cas9 domain that cuts both strands of a duplexed nucleic acid (e.g., both strands of a duplexed DNA molecule). In some embodiments, the Cas9 domain comprises any one of the amino acid sequences as set forth herein. In some embodiments the Cas9 domain comprises an amino acid sequence that is at least 60%, at least 65%, at least 70%, at least 75%, at least 80%, at least 85%, at least 90%, at least 95%, at least 96%, at least 97%, at least 98%, at least 99%, or at least 99.5% identical to any one of the amino acid sequences set forth herein. In some embodiments, the Cas9 domain comprises an amino acid sequence that has 1, 2, 3, 4, 5, 6, 7, 8, 9, 10, 11, 12, 13, 14, 15, 16, 17, 18, 19, 20, 21, 22, 21, 24, 25, 26, 27, 28, 29, 30, 31, 32, 33, 34, 35, 36, 37, 38, 39, 40, 41, 42, 43, 44, 45, 46, 47, 48, 49, 50 or more or more mutations compared to any one of the amino acid sequences set forth herein. In some embodiments, the Cas9 domain comprises an amino acid sequence that has at least 10, at least 15, at least 20, at least 30, at least 40, at least 50, at least 60, at least 70, at least 80, at least 90, at least 100, at least 150, at least 200, at least 250, at least 300, at least 350, at least 400, at least 500, at least 600, at least 700, at least 800, at least 900, at least 1000, at least 1100, or at least 1200 identical contiguous amino acid residues as compared to any one of the amino acid sequences set forth herein.

[0605] In some embodiments, the Cas9 domain is a nuclease-inactive Cas9 domain (dCas9). For example, the dCas9 domain may bind to a duplexed nucleic acid molecule (e.g., via a gRNA molecule) without cleaving either strand of the duplexed nucleic acid molecule. In some embodiments, the nuclease-inactive dCas9 domain comprises a D10X mutation and a H840X mutation of the amino acid sequence set forth herein, or a corresponding mutation in any of the amino acid sequences provided herein, wherein X is any amino acid change. In some embodiments, the nuclease-inactive dCas9 domain comprises a D10A mutation and a H840A mutation of the amino acid sequence set forth herein, or a corresponding mutation in any of the amino acid sequences provided herein. As one example, a nuclease-inactive Cas9 domain comprises the amino acid sequence set forth in Cloning vector pPlatTET-gRNA2 (Accession No. BAV54124).

MDKKYSIGLAIGTNSVGWAVITDEYKVPSKKFKVLGNTDRHSIKKNLIGA
LLFDSGETAEATRLKRTARRRYTRRKNRICYLQEIFSNEMAKVDDSFFHR
LEESFLVEEDKKHERHPIFGNIVDEVAYHEKYPTIYHLRKKLVDSTDKAD
LRLIYLALAHMIKFRGHFLIEGDLNPDNSDVDKLFIQLVQTYNQLFEENP
INASGVDAKAILSARLSKSRRLENLIAQLPGEKKNGLFGNLIALSLGLTP
NFKSNFDLAEDAKLQLSKDTYDDDLDNLLAQIGDQYADLFLAAKNLSDAI
LLSDILRVNTEITKAPLSASMIKRYDEHHQDLTLLKALVRQQLPEKYKEI
FFDQSKNGYAGYIDGGASQEEFYKFIKPILEKMDGTEELLVKLNREDLLR
KQRTFDNGSIPHQIHLGELHAILRRQEDFYPFLKDNREKIEKILTFRIPY
YVGPLARGNSRFAWMTRKSEETITPWNFEEVVDKGASAQSFIERMTNFDK
NLPNEKVLPKHSLLYEYFTVYNELTKVKYVTEGMRKPAFLSGEQKKAIVD
LLFKTNRKVTVKQLKEDYFKKIECFDSVEISGVEDRFNASLGTYHDLLKI
IKDKDFLDNEENEDILEDIVLTLTLFEDREMIEERLKTYAHLFDDKVMKQ
LKRRRYTGWGRLSRKLINGIRDKQSGKTILDFLKSDGFANRNFMQLIHDD
SLTFKEDIQKAQVSGQGDSLHEHIANLAGSPAIKKGILQTVKVVDELVKV
MGRHKPENIVIEMARENQTTQKGQKNSRERMKRIEEGIKELGSQILKEHP
VENTQLQNEKLYLYYLQNGRDMYVDQELDINRLSDYDVDAIVPQSFLKDD
SIDNKVLTRSDKNRGKSDNVPSEEVVKKMKNYWRQLLNAKLITQRKFDNL
TKAERGGLSELDKAGFIKRQLVETRQITKHVAQILDSRMNTKYDENDKLI
REVKVITLKSKLVSDFRKDFQFYKVREINNYHHAHDAYLNAVVGTALIKK
YPKLESEFVYGDYKVYDVRKMIAKSEQEIGKATAKYFFYSNIMNFFKTEI
TLANGEIRKRPLIETNGETGEIVWDKGRDFATVRKVLSMPQVNIVKKTEV
QTGGFSKESILPKRNSDKLIARKKDWDPKKYGGFDSPTVAYSVLVVAKVE
KGKSKKLKSVKELLGITIMERSSFEKNPIDFLEAKGYKEVKKDLIIKLPK
YSLFELENGRKRMLASAGELQKGNELALPSKYVNFLYLASHYEKLKGSPE
DNEQKQLFVEQHKHYLDEIIEQISEFSKRVILADANLDKVLSAYNKHRDK
PIREQAENIIHLFTLTNLGAPAAFKYFDTTIDRKRYTSTKEVLDATLIHQ
SITGLYETRIDLSQLGGD

(see, e.g., Qi et al., “Repurposing CRISPR as an RNA-guided platform for sequence-specific control of gene expression.” Cell. 2013; 152(5):1173-83, the entire contents of which are incorporated herein by reference).

[0606] Additional suitable nuclease-inactive dCas9 domains will be apparent to those of skill in the art based on this disclosure and knowledge in the field, and are within the scope of this disclosure. Such additional exemplary suitable nuclease-inactive Cas9 domains include, but are not limited to, D10A/H840A, D10A/D839A/H840A, and D10A/D839A/H840A/N863A mutant domains (See, e.g., Prashant et al., CAS9 transcriptional activators for target specificity screening and paired nickases for cooperative genome engineering. Nature Biotechnology. 2013; 31(9): 833-838, the entire contents of which are incorporated herein by reference). In some embodiments the dCas9 domain comprises an amino acid sequence that is at least 60%, at least 65%, at least 70%, at least 75%, at least 80%, at least 85%, at least 90%, at least 95%, at least 96%, at least 97%, at least 98%, at least 99%, or at least 99.5% identical to any one of the dCas9 domains provided herein. In some embodiments, the Cas9 domain comprises an amino acid sequences that has 1, 2, 3, 4, 5,6, 7, 8, 9, 10, 11, 12, 13, 14, 15, 16, 17, 18, 19, 20, 21, 22, 21, 24, 25, 26, 27, 28, 29, 30, 31, 32, 33, 34, 35, 36, 37, 38, 39, 40, 41, 42, 43, 44, 45, 46, 47, 48, 49, 50 or more or more mutations compared to any one of the amino acid sequences set forth herein. In some embodiments, the Cas9 domain comprises an amino acid sequence that has at least 10, at least 15, at least 20, at least 30, at least 40, at least 50, at least 60, at least 70, at least 80, at least 90, at least 100, at least 150, at least 200, at least 250, at least 300, at least 350, at least 400, at least 500, at least 600, at least 700, at least 800, at least 900, at least 1000, at least 1100, or at least 1200 identical contiguous amino acid residues as compared to any one of the amino acid sequences set forth herein.

[0607] In some embodiments, the Cas9 domain is a Cas9 nickase. The Cas9 nickase may be a Cas9 protein that is capable of cleaving only one strand of a duplexed nucleic acid molecule (e.g., a duplexed DNA molecule). In some embodiments the Cas9 nickase cleaves the target strand of a duplexed nucleic acid molecule, meaning that the Cas9 nickase cleaves the strand that is base paired to (complementary to) a gRNA (e.g., an sgRNA) that is bound to the Cas9. In some embodiments, a Cas9 nickase comprises a D10A mutation and has a histidine at position 840. In some embodiments the Cas9 nickase cleaves the non-target, non-base-edited strand of a duplexed nucleic acid molecule, meaning that the Cas9 nickase cleaves the strand that is not base paired to a gRNA (e.g., an sgRNA) that is bound to the Cas9. In some embodiments, a Cas9 nickase comprises an H840A mutation and has an aspartic acid residue at position 10, or a corresponding mutation. In some embodiments the Cas9 nickase comprises an amino acid sequence that is at least 60%, at least 65%, at least 70%, at least 75%, at least 80%, at least 85%, at least 90%, at least 95%, at least 96%, at least 97%, at least 98%, at least 99%, or at least 99.5% identical to any one of the Cas9 nickases provided herein. Additional suitable Cas9 nickases will be apparent to those of skill in the art based on this disclosure and knowledge in the field, and are within the scope of this disclosure.

Cas9 Domains with Reduced PAM Exclusivity

[0608] Some aspects of the disclosure provide Cas9 domains that have different PAM specificities. In one particular embodiment, the invention features nucleobase editor fusion proteins that comprise an nCas9 domain and a dCas9 domain, where each of the Cas9 domains has a different PAM specificity. Typically, Cas9 proteins, such as Cas9 from S. pyogenes (spCas9), require a canonical NGG PAM sequence to bind a particular nucleic acid region, where the “N” in “NGG” is adenosine (A), thymidine (T), or cytosine (C), and the G is guanosine. This may limit the ability to edit desired bases within a genome. In some embodiments, the base editing fusion proteins provided herein may need to be placed at a precise location, for example a region comprising a target base that is upstream of the PAM. See e.g., Komor, A. C., et al., “Programmable editing of a target base in genomic DNA without double-stranded DNA cleavage” Nature 533, 420-424 (2016), the entire contents of which are hereby incorporated by reference. Accordingly, in some embodiments, any of the fusion proteins provided herein may contain a Cas9 domain that can bind a nucleotide sequence that does not contain a canonical (e.g., NGG) PAM sequence. Cas9 domains that bind to non-canonical PAM sequences have been described in the art and would be apparent to the skilled artisan. For example, Cas9 domains that bind non-canonical PAM sequences have been described in Kleinstiver, B. P., et al., “Engineered CRISPR-Cas9 nucleases with altered PAM specificities” Nature 523, 481-485 (2015); and Kleinstiver, B. P., et al., “Broadening the targeting range of Staphylococcus aureus CRISPR-Cas9 by modifying PAM recognition” Nature Biotechnology 33, 1293-1298 (2015); the entire contents of each are hereby incorporated by reference. Several PAM variants are described at Table 3 below:

TABLE 3
Cas9 proteins and corresponding PAM sequences

| Variant | PAM |
|---|---|
| spCas9 | NGG |
| spCas9-VRQR | NGA |
| spCas9-VRER | NGCG |
| xCas9 (sp) | NGN |
| saCas9 | NNGRRT |
| saCas9-KKH | NNNRRT |
| spCas9-MQKSER | NGCG |
| spCas9-MQKSER | NGCN |
| spCas9-LRKIQK | NGTN |
| spCas9-LRVSQK | NGTN |
| spCas9-LRVSQL | NGTN |
| Cpfl | 5′(TTTV) |

[0609] In some embodiments, the Cas9 domain is a Cas9 domain from Staphylococcus aureus (SaCas9). In some embodiments, the SaCas9 domain is a nuclease active SaCas9, a nuclease inactive SaCas9 (SaCas9d), or a SaCas9 nickase (SaCas9n). In some embodiments, the SaCas9 comprises a N579A mutation, or a corresponding mutation in any of the amino acid sequences provided herein.

[0610] In some embodiments, the SaCas9 domain, the SaCas9d domain, or the SaCas9n domain can bind to a nucleic acid sequence having a non-canonical PAM. In some embodiments, the SaCas9 domain, the SaCas9d domain, or the SaCas9n domain can bind to a nucleic acid sequence having a NNGRRT PAM sequence. In some embodiments, the SaCas9 domain comprises one or more of a E781X, a N967X, and a R1014X mutation, or a corresponding mutation in any of the amino acid sequences provided herein, wherein X is any amino acid. In some embodiments, the SaCas9 domain comprises one or more of a E781K, a N967K, and a R1014H mutation, or one or more corresponding mutation in any of the amino acid sequences provided herein. In some embodiments, the SaCas9 domain comprises a E781K, a N967K, or a R1014H mutation, or corresponding mutations in any of the amino acid sequences provided herein.

### Exemplary SaCas9 Sequence

KRNYILGLDIGITSVGYGIIDYETRDVIDAGVRLFKEA
NVENNEGRRSKRGARRLKRRRRHRIQRVKKLLFDYNLL
TDHSELSGINPYEARVKGLSQKLSEEEFSAALLHLAKRR
GVHNVNEVEEDTGNELSTKEQISRNSKALEEKYVAELQL
ERLKKDGEVRGSINRFKTSDYVKEAKQLLKVQKAYHQLD
QSFIDTYIDLLETRRTYYEGPGEGSPFGWKDIKEWYEML
MGHCTYFPEELRSVKYAYNADLYNALNDLNNLVITRDEN
EKLEYYEKFQIIENVFKQKKKPTLKQIAKEILVNEEDIK
GYRVTSTGKPEFTNLKVYHDIKDITARKEIIENAELLDQ
IAKILTIYQSSEDIQEELTNLNSELTQEEIEQISNLKGY
TGTHNLSLKAINLILDELWHTNDNQIAIFNRLKLVPKKV
DLSQQKEIPTTLVDDFILSPVVKRSFIQSIKVINAIIK
KYGLPNDIIIELAREKNSKDAQKMINEMQKRNRQTNERI
EEIIRTTGKENAKYLIEKIKLHDMQEGKCLYSLEAIPLE
DLLNNPFNYEVDHIIPRSVSFDNSFNNKVLVKQEENSKK
GNRTPFQYLSSSDSKISYETFKKHILNLAKGKGRISKTK
KEYLLEERDINRFSVQKDFINRNLVDTRYATRGLMNLLR
SYFRVNNLDVKVKSINGGFTSFLRRKWKFKKERNKG
YKHHAEDALIIANADFIFKEWKKLDKAKKVMENQMFEEK
QAESMPEIETEQEYKEIFITPHQIKHIKDFKDYKYSHRV
DKKPNRELINDTLYSTRKDDKGNTLIVNNLNGLYDK
DNDKLKKLINKSPEKLLMYHHDPQTYQKLKLIMEQYGDE
KNPLYKYYEETGNYLTKYSKKDNGPVIKKIKYYGNKLNA
HLDITDDYPNSRNKVVKLSLKPYRFDVYLDNGVYKFVTV
KNLDVIKKENYYEVNSKCYEEAKKLKKISNQAEFIASFY
NNDLIKINGELYRVIGVNNDLLNRIEVNMIDITYREYLE
NMNDKRPPRIIKTIASKTQSIKKYSTDILGNLYEVKSKK
HPQIIKKG

[0612] Residue N579 above, which is underlined and in bold, may be mutated (e.g., to a A579) to yield a SaCas9 nickase.

### Exemplary SaCas9n Sequence

KRNYILGLDIGITSVGYGIIDYETRDVIDAGVRLFKEA
NVENNEGRRSKRGARRLKRRRRHRIQRVKKLLFDYNLL
TDHSELSGINPYEARVKGLSQKLSEEEFSAALLHLAKRR
GVHNVNEVEEDTGNELSTKEQISRNSKALEEKYVAELQL
ERLKKDGEVRGSINRFKTSDYVKEAKQLLKVQKAYHQLD
QSFIDTYIDLLETRRTYYEGPGEGSPFGWKDIKEWYEML
MGHCTYFPEELRSVKYAYNADLYNALNDLNNLVITRDEN
EKLEYYEKFQIIENVFKQKKKPTLKQIAKEILVNEEDIK
GYRVTSTGKPEFTNLKVYHDIKDITARKEIIENAELLDQ
IAKILTIYQSSEDIQEELTNLNSELTQEEIEQISNLKGY
TGTHNLSLKAINLILDELWHTNDNQIAIFNRLKLVPKKV
DLSQQKEIPTTLVDDFILSPVVKRSFIQSIKVINAIIK
KYGLPNDIIIELAREKNSKDAQKMINEMQKRNRQTNERI
EEIIRTTGKENAKYLIEKIKLHDMQEGKCLYSLEAIPLE
DLLNNPFNYEVDHIIPRSVSFDNSFNNKVLVKQEEASKK
GNRTPFQYLSSSDSKISYETFKKHILNLAKGKGRISKTK
KEYLLEERDINRFSVQKDFINRNLVDTRYATRGLMNLLR
SYFRVNNLDVKVKSINGGFTSFLRRKWKFKKERNKGYKH
HAEDALIIANADFIFKEWKKLDKAKKVMENQMFEEKQAE
SMPEIETEQEYKEIFITPHQIKHIKDFKDYKYSHRVDKK
PNRELINDTLYSTRKDDKGNTLIVNNLNGLYDKDNDKLK
KLINKSPEKLLMYHHDPQTYQKLKLIMEQYGDEKNPLYK
YYEETGNYLTKYSKKDNGPVIKKIKYYGNKLNAHLDITD
DYPNSRNKVVKLSLKPYRFDVYLDNGVYKFVTVKNLDVI
KKENYYEVNSKCYEEAKKLKKISNQAEFIASFYNNDLIK
INGELYRVIGVNNDLLNRIEVNMIDITYREYLENMNDKR
PPRIIKTIASKTQSIKKYSTDILGNLYEVKSKKHPQIIKKG

[0614] Residue A579 above, which can be mutated from N579 to yield a SaCas9 nickase, is underlined and in bold.

### Exemplary SaKKH Cas9

KRNYILGLDIGITSVGYGIIDYETRDVIDAGVRLFKEANVENNEGRRS
KRGARRLKRRRRHRIQRVKKLLFDYNLLTDHSELSGINPYEARVKGLS
QKLSEEEFSAALLHLAKRRGVHNVNEVEEDTGNELSTKEQISRNSKAL
EEKYVAELQLERLKKDGEVRGSINRFKTSDYVKEAKQLLKVQKAYHQL
DQSFIDTYIDLLETRRTYYEGPGEGSPFGWKDIKEWYEMLMGHCTYFP
EELRSVKYAYNADLYNALNDLNNLVITRDENEKLEYYEKFQIIENVFK
QKKKPTLKQIAKEILVNEEDIKGYRVTSTGKPEFTNLKVYHDIKDITA
RKEIIENAELLDQIAKILTIYQSSEDIQEELTNLNSELTQEEIEQISN
LKGYTGTHNLSLKAINLILDELWHTNDNQIAIFNRLKLVPKKVDLSQQ
KEIPTTLVDDFILSPVVKRSFIQSIKVINAIIKKYGLPNDIIIELARE
KNSKDAQKMINEMQKRNRQTNERIEEIIRTTGKENAKYLIEKIKLHDM
QEGKCLYSLEAIPLEDLLNNPFNYEVDHIIPRSVSFDNSFNNKVLVKQ
EEASKKGNRTPFQYLSSSDSKISYETFKKHILNLAKGKGRISKTKKEY
LLEERDINRFSVQKDFINRNLVDTRYATRGLMNLLRSYFRVNNLDVKV
KSINGGFTSFLRRKWKFKKERNKGYKHHAEDALIIANADFIFKEWKKL
DKAKKVMENQMFEEKQAESMPEIETEQEYKEIFITPHQIKHIKDFKDY
KYSHRVDKKPNRKLINDTLYSTRKDDKGNTLIVNNLNGLYDKDNDKLK
KLINKSPEKLLMYHHDPQTYQKLKLIMEQYGDEKNPLYKYYEETGNYL
TKYSKKDNGPVIKKIKYYGNKLNAHLDITDDYPNSRNKVVKLSLKPYR
FDVYLDNGVYKFVTVKNLDVIKKENYYEVNSKCYEEAKKLKKISNQAE
FIASFYKNDLIKINGELYRVIGVNNDLLNRIEVNMIDITYREYLENMN
DKRPPHIIKTIASKTQSIKKYSTDILGNLYEVKSKKHPQIIKKG.

[0616] Residue A579 above, which can be mutated from N579 to yield a SaCas9 nickase, is underlined and in bold. Residues K781, K967, and H1014 above, which can be mutated from E781, N967, and R1014 to yield a SaKKH Cas9 are underlined and in italics.

[0617] In some embodiments, the Cas9 domain is a Cas9 domain from Streptococcus pyogenes (SpCas9). In some embodiments, the SpCas9 domain is a nuclease active SpCas9, a nuclease inactive SpCas9 (SpCas9d), or a SpCas9 nickase (SpCas9n). In some embodiments, the SpCas9 comprises a D9X mutation, or a corresponding mutation in any of the amino acid sequences provided herein, wherein X is any amino acid except for D. In some embodiments, the SpCas9 comprises a D9A mutation, or a corresponding mutation in any of the amino acid sequences provided herein. In some embodiments, the SpCas9 domain, the SpCas9d domain, or the SpCas9n domain can bind to a nucleic acid sequence having a non-canonical PAM. In some embodiments, the SpCas9 domain, the SpCas9d domain, or the SpCas9n domain can bind to a nucleic acid sequence having an NGG, a NGA, or a NGCG PAM sequence. In some embodiments, the SpCas9 domain comprises one or more of a D1134X, a R1334X, and a T1336X mutation, or a corresponding mutation in any of the amino acid sequences provided herein, wherein X is any amino acid. In some embodiments, the SpCas9 domain comprises one or more of a D1134E, R1334Q, and T1336R mutation, or a corresponding mutation in any of the amino acid sequences provided herein. In some embodiments, the SpCas9 domain comprises a D1134E, a R1334Q, and a T1336R mutation, or corresponding mutations in any of the amino acid sequences provided herein. In some embodiments, the SpCas9 domain comprises one or more of a D1134X, a R1334X, and a T1336X mutation, or a corresponding mutation in any of the amino acid sequences provided herein, wherein X is any amino acid. In some embodiments, the SpCas9 domain comprises one or more of a D1134V, a R1334Q, and a T1336R mutation, or a corresponding mutation in any of the amino acid sequences provided herein. In some embodiments, the SpCas9 domain comprises a D1134V, a R1334Q, and a T1336R mutation, or corresponding mutations in any of the amino acid sequences provided herein. In some embodiments, the SpCas9 domain comprises one or more of a D1134X, a G1217X, a R1334X, and a T1336X mutation, or a corresponding mutation in any of the amino acid sequences provided herein, wherein X is any amino acid. In some embodiments, the SpCas9 domain comprises one or more of a D1134V, a G1217R, a R1334Q, and a T1336R mutation, or a corresponding mutation in any of the amino acid sequences provided herein. In some embodiments, the SpCas9 domain comprises a D1134V, a G1217R, a R1334Q, and a T1336R mutation, or corresponding mutations in any of the amino acid sequences provided herein.

[0618] In some embodiments, the Cas9 domain of any of the fusion proteins provided herein comprises an amino acid sequence that is at least 60%, at least 65%, at least 70%, at least 75%, at least 80%, at least 85%, at least 90%, at least 95%, at least 96%, at least 97%, at least 98%, at least 99%, or at least 99.5% identical to a Cas9 polypeptide described herein. In some embodiments, the Cas9 domain of any of the fusion proteins provided herein comprises the amino acid sequence of any Cas9 polypeptide described herein. In some embodiments, the Cas9 domain of any of the fusion proteins provided herein consists of the amino acid sequence of any Cas9 polypeptide described herein.

### Exemplary SpCas9

DKKYSIGLDIGTNSVGWAVITDEYKVPSKKFKVLGNTDRHSIKKNLIGAL
LFDSGETAEATRLKRTARRRYTRRKNRICYLQEIFSNEMAKVDDSFFHRL
EESFLVEEDKKHERHPIFGNIVDEVAYHEKYPTIYHLRKKLVDSTDKADL
RLIYLALAHMIKFRGHFLIEGDLNPDNSDVDKLFIQLVQTYNQLFEENPI
NASGVDAKAILSARLSKSRRLENLIAQLPGEKKNGLFGNLIALSLGLTPN
FKSNFDLAEDAKLQLSKDTYDDDLDNLLAQIGDQYADLFLAAKNLSDAIL
LSDILRVNTEITKAPLSASMIKRYDEHHQDLTLLKALVRQQLPEKYKEIF
FDQSKNGYAGYIDGGASQEEFYKFIKPILEKMDGTEELLVKLNREDLLRK
QRTFDNGSIPHQIHLGELHAILRRQEDFYPFLKDNREKIEKILTFRIPYY
VGPLARGNSRFAWMTRKSEETITPWNFEEVVDKGASAQSFIERMTNFDKN
LPNEKVLPKHSLLYEYFTVYNELTKVKYVTEGMRKPAFLSGEQKKAIVDL
LFKTNRKVTVKQLKEDYFKKIECFDSVEISGVEDRFNASLGTYHDLLKII
KDKDFLDNEENEDILEDIVLTLTLFEDREMIEERLKTYAHLFDDKVMKQL
KRRRYTGWGRLSRKLINGIRDKQSGKTILDFLKSDGFANRNFMQLIHDDS
LTFKEDIQKAQVSGQGDSLHEHIANLAGSPAIKKGILQTVKVVDELVKVM
GRHKPENIVIEMARENQTTQKGQKNSRERMKRIEEGIKELGSQILKEHPV
ENTQLQNEKLYLYYLQNGRDMYVDQELDINRLSDYDVDHIVPQSFLKDDS
IDNKVLTRSDKNRGKSDNVPSEEVVKKMKNYWRQLLNAKLITQRKFDNLT
KAERGGLSELDKAGFIKRQLVETRQITKHVAQILDSRMNTKYDENDKLIR
EVKVITLKSKLVSDFRKDFQFYKVREINNYHHAHDAYLNAVVGTALIKKY
PKLESEFVYGDYKVYDVRKMIAKSEQEIGKATAKYFFYSNIMNFFKTEIT
LANGEIRKRPLIETNGETGEIVWDKGRDFATVRKVLSMPQVNIVKKTEVQ
TGGFSKESILPKRNSDKLIARKKDWDPKKYGGFDSPTVAYSVLVVAKVEK
GKSKKLKSVKELLGITIMERSSFEKNPIDFLEAKGYKEVKKDLIIKLPKY
SLFELENGRKRMLASAGELQKGNELALPSKYVNFLYLASHYEKLKGSPED
NEQKQLFVEQHKHYLDEIIEQISEFSKRVILADANLDKVLSAYNKHRDKP
IREQAENIIHLFTLTNLGAPAAFKYFDTTIDRKRYTSTKEVLDATLIHQS
ITGLYETRIDLSQLGGD

### Exemplary SpCas9n

DKKYSIGLAIGTNSVGWAVITDEYKVPSKKFKVLGNTDR
HSIKKNLIGALLFDSGETAEATRLKRTARRRYTRRKNRI
CYLQEIFSNEMAKVDDSFFHRLEESFLVEEDKKHERH
PIFGNIVDEVAYHEKYPTIYHLRKKLVDSTDKADLRLIY
LALAHMIKFRGHFLIEGDLNPDNSDVDKLFIQLVQTYN
QLFEENPINASGVDAKAILSARLSKSRRLENLIAQLPGE
KKNGLFGNLIALSLGLTPNFKSNFDLAEDAKLQLSKDTY
DDDLDNLLAQIGDQYADLFLAAKNLSDAILLSDILRV
NTEITKAPLSASMIKRYDEHHQDLTLLKALVRQQLPEKY
KEIFFDQSKNGYAGYIDGGASQEEFYKFIKPILEKMDG
TEELLVKLNREDLLRKQRTFDNGSIPHQIHLGELHAILRR
QEDFYPFLKDNREKIEKILTFRIPYYVGPLARGNSRFAW
MTRKSEETITPWNFEEVVDKGASAQSFIERMTNFDKNL
PNEKVLPKHSLLYEYFTVYNELTKVKYVTEGMRKPAFL
SGEQKKAIVDLLFKTNRKVTVKQLKEDYFKKIECFDS
VEISGVEDRFNASLGTYHDLLKIIKDKDFLDNEENE
DILEDIVLTLTLFEDREMIEERLKTYAHLFDDKVMKQ
LKRRRYTGWGRLSRKLINGIRDKQSGKTILDFLKSDG
FANRNFMQLIHDDSLTFKEDIQKAQVSGQGDSLHEHIA
NLAGSPAIKKGILQTVKVVDELVKVMGRHKPENIVIEM
ARENQTTQKGQKNSRERMKRIEEGIKELGSQILKEHPV
ENTQLQNEKLYLYYLQNGRDMYVDQELDINRLSDYDV
DHIVPQSFLKDDSIDNKVLTRSDKNRGKSDNVPSEE
VVKKMKNYWRQLLNAKLITQRKFDNLTKAERGGLSELD
KAGFIKRQLVETRQITKHVAQILDSRMNTKYDENDKL
IREVKVITLKSKLVSDFRKDFQFYKVREINNYHHAHD
AYLNAVVGTALIKKYPKLESEFVYGDYKVYDVRKMIA
KSEQEIGKATAKYFFYSNIMNFFKTEITLANGEIRKR
PLIETNGETGEIVWDKGRDFATVRKVLSMPQVNIVKK
TEVQTGGFSKESILPKRNSDKLIARKKDWDPKKYGGFD
SPTVAYSVLVVAKVEKGKSKKLKSVKELLGITIMERSS
FEKNPIDFLEAKGYKEVKKDLIIKLPKYSLFELENGR
KRMLASAGELQKGNELALPSKYVNFLYLASHYEKLKG
SPEDNEQKQLFVEQHKHYLDEIIEQISEFSKRVILAD
ANLDKVLSAYNKHRDKPIREQAENIIHLFTLTNLGA
PAAFKYFDTTIDRKRYTSTKEVLDATLIHQSITGLY
ETRIDLSQLGGD

### Exemplary SpEQR Cas9

DKKYSIGLAIGTNSVGWAVITDEYKVPSKKFKVLGNTDRHSIKKNLIGAL
LFDSGETAEATRLKRTARRRYTRRKNRICYLQEIFSNEMAKVDDSFFHRL
EESFVEEDKKHERHPIFGNIVDEVAYHEKYPTIYHLRKKLVDSTDKADLR
LIYLALAHMIKFRGHFLIEGDLNPDNSDVDKLFIQLVQTYNQLFEENPIN
ASGVDAKAILSARLSKSRRLENLIAQLPGEKKNGLFGNLIALSLGLTPNF
KSNFDLAEDAKLQLSKDTYDDDLDNLLAQIGDQYADLFLAAKNLSDAILL
SDILRVNTEITKAPLSASMIKRYDEHHQDLTLLKALVRQQLPEKYKEIFF
DQSKNGYAGYIDGGASQEEFYKFIKPILEKMDGTEELLVKLNREDLLRKQ
RTFDNGSIPHQIHLGELHAILRRQEDFYPFLKDNREKIEKILTFRIPYYV
GPLARGNSRFAWMTRKSEETITPWNFEEVVDKGASAQSFIERMTNFDKNL
PNEKVLPKHSLLYEYFTVYNELTKVKYVTEGMRKPAFLSGEQKKAIVDLL
FKTNRKVTVKQLKEDYFKKIECFDSVEISGVEDRFNASLGTYHDLLKIIK
DKDFLDNEENEDILEDIVLTLTLFEDREMIEERLKTYAHLFDDKVMKQLK
RRRYTGWGRLSRKLINGIRDKQSGKTILDFLKSDGFANRNFMQLIHDDSL
TFKEDIQKAQVSGQGDSLHEHIANLAGSPAIKKGILQTVKVVDELVKVMG
RHKPENIVIEMARENQTTQKGQKNSRERMKRIEEGIKELGSQILKEHPVE
NTQLQNEKLYLYYLQNGRDMYVDQELDINRLSDYDVDHIVPQSFLKDDSI
DNKVLTRSDKNRGKSDNVPSEEVVKKMKNYWRQLLNAKLITQRKFDNLTK
AERGGLSELDKAGFIKRQLVETRQITKHVAQILDSRMNTKYDENDKLIRE
VKVITLKSKLVSDFRKDFQFYKVREINNYHHAHDAYLNAVVGTALIKKYP
KLESEFVYGDYKVYDVRKMIAKSEQEIGKATAKYFFYSNIMNFFKTEITL
ANGEIRKRPLIETNGETGEIVWDKGRDFATVRKVLSMPQVNIVKKTEVQT
GGFSKESILPKRNSDKLIARKKDWDPKKYGGFESPTVAYSVLVVAKVEKG
KSKKLKSVKELLGITIMERSSFEKNPIDFLEAKGYKEVKKDLIIKLPKYS
LFELENGRKRMLASAGELQKGNELALPSKYVNFLYLASHYEKLKGSPEDN
EQKQLFVEQHKHYLDEIIEQISEFSKRVILADANLDKVLSAYNKHRDKPI
REQAENIIHLFTLTNLGAPAAFKYFDTTIDRKQYRSTKEVLDATLIHQSI
TGLYETRIDLSQLGGD

[0622] Residues E1134, Q1334, and R1336 above, which can be mutated from D1134, R1334, and T1336 to yield a SpEQR Cas9, are underlined and in bold.

### Exemplary SpVQR Cas9

DKKYSIGLAIGTNSVGWAVITDEYKVPSKKFKVLGNTDRHSIKKNLIGAL
LFDSGETAEATRLKRTARRRYTRRKNRICYLQEIFSNEMAKVDDSFFHRL
EESFLVEEDKKHERHPIFGNIVDEVAYHEKYPTIYHLRKKLVDSTDKADL
RLIYLALAHMIKFRGHFLIEGDLNPDNSDVDKLFIQLVQTYNQLFEENPI
NASGVDAKAILSARLSKSRRLENLIAQLPGEKKNGLFGNLIALSLGLTPN
FKSNFDLAEDAKLQLSKDTYDDDLDNLLAQIGDQYADLFLAAKNLSDAIL
LSDILRVNTEITKAPLSASMIKRYDEHHQDLTLLKALVRQQLPEKYKEIF
FDQSKNGYAGYIDGGASQEEFYKFIKPILEKMDGTEELLVKLNREDLLRK
QRTFDNGSIPHQIHLGELHAILRRQEDFYPFLKDNREKIEKILTFRIPYY
VGPLARGNSRFAWMTRKSEETITPWNFEEVVDKGASAQSFIERMTNFDKN
LPNEKVLPKHSLLYEYFTVYNELTKVKYVTEGMRKPAFLSGEQKKAIVDL
LFKTNRKVTVKQLKEDYFKKIECFDSVEISGVEDRFNASLGTYHDLLKII
KDKDFLDNEENEDILEDIVLTLTLFEDREMIEERLKTYAHLFDDKVMKQL
KRRRYTGWGRLSRKLINGIRDKQSGKTILDFLKSDGFANRNFMQLIHDDS
LTFKEDIQKAQVSGQGDSLHEHIANLAGSPAIKKGILQTVKVVDELVKVM
GRHKPENIVIEMARENQTTQKGQKNSRERMKRIEEGIKELGSQILKEHPV
ENTQLQNEKLYLYYLQNGRDMYVDQELDINRLSDYDVDHIVPQSFLKDDS
IDNKVLTRSDKNRGKSDNVPSEEVVKKMKNYWRQLLNAKLITQRKFDNLT
KAERGGLSELDKAGFIKRQLVETRQITKHVAQILDSRMNTKYDENDKLIR
EVKVITLKSKLVSDFRKDFQFYKVREINNYHHAHDAYLNAVVGTALIKKY
PKLESEFVYGDYKVYDVRKMIAKSEQEIGKATAKYFFYSNIMNFFKTEIT
LANGEIRKRPLIETNGETGEIVWDKGRDFATVRKVLSMPQVNIVKKTEVQ
TGGFSKESILPKRNSDKLIARKKDWDPKKYGGFVSPTVAYSVLVVAKVEK
GKSKKLKSVKELLGITIMERSSFEKNPIDFLEAKGYKEVKKDLIIKLPKY
SLFELENGRKRMLASAGELQKGNELALPSKYVNFLYLASHYEKLKGSPED
NEQKQLFVEQHKHYLDEIIEQISEFSKRVILADANLDKVLSAYNKHRDKP
IREQAENIIHLFTLTNLGAPAAFKYFDTTIDRKQYRSTKEVLDATLIHQS
ITGLYETRIDLSQLGGD

[0624] Residues V1134, Q1334, and R1336 above, which can be mutated from D1134, R1334, and T1336 to yield a SpVQR Cas9, are underlined and in bold.

### Exemplary SpVRER Cas9

DKKYSIGLAIGTNSVGWAVITDEYKVPSKKFKVLGNTDRHSIKKNLIGAL
LFDSGETAEATRLKRTARRRYTRRKNRICYLQEIFSNEMAKVDDSFFHRL
EESFLVEEDKKHERHPIFGNIVDEVAYHEKYPTIYHLRKKLVDSTDKADL
RLIYLALAHMIKFRGHFLIEGDLNPDNSDVDKLFIQLVQTYNQLFEENPI
NASGVDAKAILSARLSKSRRLENLIAQLPGEKKNGLFGNLIALSLGLTPN
FKSNFDLAEDAKLQLSKDTYDDDLDNLLAQIGDQYADLFLAAKNLSDAIL
LSDILRVNTEITKAPLSASMIKRYDEHHQDLTLLKALVRQQLPEKYKEIF
FDQSKNGYAGYIDGGASQEEFYKFIKPILEKMDGTEELLVKLNREDLLRK
QRTFDNGSIPHQIHLGELHAILRRQEDFYPFLKDNREKIEKILTFRIPYY
VGPLARGNSRFAWMTRKSEETITPWNFEEVVDKGASAQSFIERMTNFDKN
LPNEKVLPKHSLLYEYFTVYNELTKVKYVTEGMRKPAFLSGEQKKAIVDL
LFKTNRKVTVKQLKEDYFKKIECFDSVEISGVEDRFNASLGTYHDLLKII
KDKDFLDNEENEDILEDIVLTLTLFEDREMIEERLKTYAHLFDDKVMKQL
KRRRYTGWGRLSRKLINGIRDKQSGKTILDFLKSDGFANRNFMQLIHDDS
LTFKEDIQKAQVSGQGDSLHEHIANLAGSPAIKKGILQTVKVVDELVKVM
GRHKPENIVIEMARENQTTQKGQKNSRERMKRIEEGIKELGSQILKEHPV
ENTQLQNEKLYLYYLQNGRDMYVDQELDINRLSDYDVDHIVPQSFLKDDS
IDNKVLTRSDKNRGKSDNVPSEEVVKKMKNYWRQLLNAKLITQRKFDNLT
KAERGGLSELDKAGFIKRQLVETRQITKHVAQILDSRMNTKYDENDKLIR
EVKVITLKSKLVSDFRKDFQFYKVREINNYHHAHDAYLNAVVGTALIKKY
PKLESEFVYGDYKVYDVRKMIAKSEQEIGKATAKYFFYSNIMNFFKTEIT
LANGEIRKRPLIETNGETGEIVWDKGRDFATVRKVLSMPQVNIVKKTEVQ
TGGFSKESILPKRNSDKLIARKKDWDPKKYGGFVSPTVAYSVLVVAKVEK
GKSKKLKSVKELLGITIMERSSFEKNPIDFLEAKGYKEVKKDLIIKLPKY
SLFELENGRKRMLASARELQKGNELALPSKYVNFLYLASHYEKLKGSPED
NEQKQLFVEQHKHYLDEIIEQISEFSKRVILADANLDKVLSAYNKHRDKP
IREQAENIIHLFTLTNLGAPAAFKYFDTTIDRKEYRSTKEVLDATLIHQS
ITGLYETRIDLSQLGGD.

[0626] Residues V1134, R1217, Q1334, and R1336 above, which can be mutated from D1134, G1217, R1334, and T1336 to yield a SpVRER Cas9, are underlined and in bold.

### High Fidelity Cas9 Domains

[0627] Some aspects of the disclosure provide high fidelity Cas9 domains. In some embodiments, high fidelity Cas9 domains are engineered Cas9 domains comprising one or more mutations that decrease electrostatic interactions between the Cas9 domain and a sugar-phosphate backbone of a DNA, as compared to a corresponding wild-type Cas9 domain. Without wishing to be bound by any particular theory, high fidelity Cas9 domains that have decreased electrostatic interactions with a sugar-phosphate backbone of DNA may have less off-target effects. In some embodiments, a Cas9 domain (e.g., a wild type Cas9 domain) comprises one or more mutations that decreases the association between the Cas9 domain and a sugar-phosphate backbone of a DNA. In some embodiments, a Cas9 domain comprises one or more mutations that decreases the association between the Cas9 domain and a sugar-phosphate backbone of a DNA by at least 1%, at least 2%, at least 3%, at least 4%, at least 5%, at least 10%, at least 15%, at least 20%, at least 25%, at least 30%, at least 35%, at least 40%, at least 45%, at least 50%, at least 55%, at least 60%, at least 65%, or at least 70%.

[0628] In some embodiments, any of the Cas9 fusion proteins provided herein comprise one or more of a N497X, a R661X, a Q695X, and/or a Q926X mutation, or a corresponding mutation in any of the amino acid sequences provided herein, wherein X is any amino acid. In some embodiments, any of the Cas9 fusion proteins provided herein comprise one or more of a N497A, a R661A, a Q695A, and/or a Q926A mutation, or a corresponding mutation in any of the amino acid sequences provided herein. In some embodiments, the Cas9 domain comprises a D10A mutation, or a corresponding mutation in any of the amino acid sequences provided herein. Cas9 domains with high fidelity are known in the art and would be apparent to the skilled artisan. For example, Cas9 domains with high fidelity have been described in Kleinstiver, B. P., et al. “High-fidelity CRISPR-Cas9 nucleases with no detectable genome-wide off-target effects.” Nature 529, 490-495 (2016); and Slaymaker, I. M., et al. “Rationally engineered Cas9 nucleases with improved specificity.” Science 351, 84-88 (2015); the entire contents of each are incorporated herein by reference.

[0629] High Fidelity Cas9 domain mutations relative to Cas9 are shown in bold and underlines

DKKYSIGLAIGTNSVGWAVITDEYKVPSKKFKVLGNTDRHSIKKNLIGAL
LFDSGETAEATRLKRTARRRYTRRKNRICYLQEIFSNEMAKVDDSFFHRL
EESFLVEEDKKHERHPIFGNIVDEVAYHEKYPTIYHLRKKLVDSTDKADL
RLIYLALAHMIKFRGHFLIEGDLNPDNSDVDKLFIQLVQTYNQLFEENPI
NASGVDAKAILSARLSKSRRLENLIAQLPGEKKNGLFGNLIALSLGLTPN
FKSNFDLAEDAKLQLSKDTYDDDLDNLLAQIGDQYADLFLAAKNLSDAIL
LSDILRVNTEITKAPLSASMIKRYDEHHQDLTLLKALVRQQLPEKYKEIF
FDQSKNGYAGYIDGGASQEEFYKFIKPILEKMDGTEELLVKLNREDLLRK
QRTFDNGSIPHQIHLGELHAILRRQEDFYPFLKDNREKIEKILTFRIPYY
VGPLARGNSRFAWMTRKSEETITPWNFEEVVDKGASAQSFIERMTAFDKN
LPNEKVLPKHSLLYEYFTVYNELTKVKYVTEGMRKPAFLSGEQKKAIVDL
LFKTNRKVTVKQLKEDYFKKIECFDSVEISGVEDRFNASLGTYHDLLKII
KDKDFLDNEENEDILEDIVLTLTLFEDREMIEERLKTYAHLFDDKVMKQL
KRRRYTGWGALSRKLINGIRDKQSGKTILDFLKSDGFANRNFMALIHDDS
LTFKEDIQKAQVSGQGDSLHEHIANLAGSPAIKKGILQTVKVVDELVKVM
GRHKPENIVIEMARENQTTQKGQKNSRERMKRIEEGIKELGSQILKEHPV
ENTQLQNEKLYLYYLQNGRDMYVDQELDINRLSDYDVDHIVPQSFLKDDS
IDNKVLTRSDKNRGKSDNVPSEEVVKKMKNYWRQLLNAKLITQRKFDNLT
KAERGGLSELDKAGFIKRQLVETRAITKHVAQILDSRMNTKYDENDKLIR
EVKVITLKSKLVSDFRKDFQFYKVREINNYHHAHDAYLNAVVGTALIKKY
PKLESEFVYGDYKVYDVRKMIAKSEQEIGKATAKYFFYSNIMNFFKTEIT
LANGEIRKRPLIETNGETGEIVWDKGRDFATVRKVLSMPQVNIVKKTEVQ
TGGFSKESILPKRNSDKLIARKKDWDPKKYGGFDSPTVAYSVLVVAKVEK
GKSKKLKSVKELLGITIMERSSFEKNPIDFLEAKGYKEVKKDLIIKLPKY
SLFELENGRKRMLASAGELQKGNELALPSKYVNFLYLASHYEKLKGSPED
NEQKQLFVEQHKHYLDEIIEQISEFSKRVILADANLDKVLSAYNKHRDKP
IREQAENIIHLFTLTNLGAPAAFKYFDTTIDRKRYTSTKEVLDATLIHQS
ITGLYETRIDLSQLGGD

### Nucleic Acid Programmable DNA Binding Proteins

[0630] Some aspects of the disclosure provide nucleic acid programmable DNA binding proteins, which may be used to guide a protein, such as a base editor, to a specific nucleic acid (e.g., DNA or RNA) sequence. Nucleic acid programmable DNA binding proteins include, without limitation, Cas9 (e.g., dCas9 and nCas9), CasX, CasY, Cpf1, Cas12b/C2c1, and Cas12c/C2c3. One example of a nucleic acid programmable DNA-binding protein that has different PAM specificity than Cas9 is Clustered Regularly Interspaced Short Palindromic Repeats from Prevotella and Francisella 1 (Cpf1). Similar to Cas9, Cpf1 is also a class 2 CRISPR effector, it has been shown that Cpf1 mediates robust DNA interference with features distinct from Cas9. Cpf1 is a single RNA-guided endonuclease lacking tracrRNA, and it utilizes a T-rich protospacer-adjacent motif (TTN, TTTN, or YTN). Moreover, Cpf1 cleaves DNA via a staggered DNA double-stranded break. Out of 16 Cpf1-family proteins, two enzymes from Acidaminococcus and Lachnospiraceae are shown to have efficient genome-editing activity in human cells. Cpf1 proteins are known in the art and have been described previously, for example Yamano et al., “Crystal structure of Cpf1 in complex with guide RNA and target DNA.” Cell (165) 2016, p. 949-962; the entire contents of which is hereby incorporated by reference.

[0631] Also useful in the present compositions and methods are nuclease-inactive Cpf1 (dCpf1) variants that may be used as a guide nucleotide sequence-programmable DNA-binding protein domain. The Cpf1 protein has a RuvC-like endonuclease domain that is similar to the RuvC domain of Cas9 but does not have a HNH endonuclease domain, and the N-terminal of Cpf1 does not have the alfa-helical recognition lobe of Cas9. It was shown in Zetsche et al., Cell, 163, 759-771, 2015 (which is incorporated herein by reference) that, the RuvC-like domain of Cpf1 is responsible for cleaving both DNA strands and inactivation of the RuvC-like domain inactivates Cpf1 nuclease activity. For example, mutations corresponding to D917A, E1006A, or D1255A in Francisella novicida Cpf1 inactivate Cpf1 nuclease activity. In some embodiments, the dCpf1 of the present disclosure comprises mutations corresponding to D917A, E1006A, D1255A, D917A/E1006A, D917A/D1255A, E1006A/D1255A, or D917A/E1006A/D1255A. It is to be understood that any mutations, e.g., substitution mutations, deletions, or insertions that inactivate the RuvC domain of Cpf1, may be used in accordance with the present disclosure.

[0632] In some embodiments, the nucleic acid programmable DNA binding protein (napDNAbp) of any of the fusion proteins provided herein may be a Cpf1 protein. In some embodiments, the Cpf1 protein is a Cpf1 nickase (nCpf1). In some embodiments, the Cpf1 protein is a nuclease inactive Cpf1 (dCpf1). In some embodiments, the Cpf1, the nCpf1, or the dCpf1 comprises an amino acid sequence that is at least 85%, at least 90%, at least 91%, at least 92%, at least 93%, at least 94%, at least 95%, at least 96%, at least 97%, at least 98%, at least 99%, or at least 99.5% identical to a Cpf1 sequence disclosed herein. In some embodiments, the dCpf1 comprises an amino acid sequence that is at least 85%, at least 90%, at least 91%, at least 92%, at least 93%, at least 94%, at least 95%, at least 96%, at least 97%, at least 98%, at least 99%, or at ease 99.5% identical to a Cpf1 sequence disclosed herein, and comprises mutations corresponding to D917A, E1006A, D1255A, D917A/E1006A, D917A/D1255A, E1006A/D1255A, or D917A/E1006A/D1255A. It should be appreciated that Cpf1 from other bacterial species may also be used in accordance with the present disclosure.

[0633] Wild type Francisella novicida Cpf1 (D917, E1006, and D1255 are bolded and underlined)

MSIYQEFVNKYSLSKTLRFELIPQGKTLENIKARGLILDDEKRAKDYKKA
KQIIDKYHQFFIEEILSSVCISEDLLQNYSDVYFKLKKSDDDNLQKDFKS
AKDTIKKQISEYIKDSEKFKNLFNQNLIDAKKGQESDLILWLKQSKDNGI
ELFKANSDITDIDEALEIIKSFKGWTTYFKGFHENRKNVYSSNDIPTSII
YRIVDDNLPKFLENKAKYESLKDKAPEAINYEQIKKDLAEELTFDIDYKT
SEVNQRVFSLDEVFEIANFNNYLNQSGITKFNTIIGGKFVNGENTKRKGI
NEYINLYSQQINDKTLKKYKMSVLFKQILSDTESKSFVIDKLEDDSDVVT
TMQSFYEQIAAFKTVEEKSIKETLSLLFDDLKAQKLDLSKIYFKNDKSLT
DLSQQVFDDYSVIGTAVLEYITQQIAPKNLDNPSKKEQELIAKKTEKAKY
LSLETIKLALEEFNKHRDIDKQCRFEEILANFAAIPMIFDEIAQNKDNLA
QISIKYQNQGKKDLLQASAEDDVKAIKDLLDQTNNLLHKLKIFHISQSED
KANILDKDEHFYLVFEECYFELANIVPLYNKIRNYITQKPYSDEKFKLNF
ENSTLANGWDKNKEPDNTAILFIKDDKYYLGVMNKKNNKIFDDKAIKENK
GEGYKKIVYKLLPGANKMLPKVFFSAKSIKFYNPSEDILRIRNHSTHTKN
GSPQKGYEKFEFNIEDCRKFIDFYKQSISKHPEWKDFGFRFSDTQRYNSI
DEFYREVENQGYKLTFENISESYIDSVVNQGKLYLFQIYNKDFSAYSKGR
PNLHTLYWKALFDERNLQDVVYKLNGEAELFYRKQSIPKKITHPAKEAIA
NKNKDNPKKESVFEYDLIKDKRFTEDKFFFHCPITINFKSSGANKFNDEI
NLLLKEKANDVHILSIDRGERHLAYYTLVDGKGNIIKQDTFNIIGNDRMK
TNYHDKLAAIEKDRDSARKDWKKINNIKEMKEGYLSQVVHEIAKLVIEYN
AIVVFEDLNFGFKRGRFKVEKQVYQKLEKMLIEKLNYLVFKDNEFKTGGV
LRAYQLTAPFETFKKMGKQTGIIYYVPAGFTSKICPVTGFVNQLYPKYES
VSKSQEFFSKFDKICYNLDKGYFEFSFDYKNFGDKAAKGKWTIASFGSRL
INFRNSDKNHNWDTREVYPTKELEKLLKDYSIEYGHGECIKAAICGESDK
KFFAKLTSVLNTILQMRNSKTGTELDYLISPVADVNGNFFDSRQAPKNMP
QDADANGAYHIGLKGLMLLGRIKNNQEGKKLNLVIKNEEYFEFVQNRNN

[0634] Francisella novicida Cpf1 D917A (A917, E1006, and D1255 are bolded and underlined)

MSIYQEFVNKYSLSKTLRFELIPQGKTLENIKARGLILDDEKRAKDYKKA
KQIIDKYHQFFIEEILSSVCISEDLLQNYSDVYFKLKKSDDDNLQKDFKS
AKDTIKKQISEYIKDSEKFKNLFNQNLIDAKKGQESDLILWLKQSKDNGI
ELFKANSDITDIDEALEIIKSFKGWTTYFKGFHENRKNVYSSNDIPTSII
YRIVDDNLPKFLENKAKYESLKDKAPEAINYEQIKKDLAEELTFDIDYKT
SEVNQRVFSLDEVFEIANFNNYLNQSGITKFNTIIGGKFVNGENTKRKGI
NEYINLYSQQINDKTLKKYKMSVLFKQILSDTESKSFVIDKLEDDSDVVT
TMQSFYEQIAAFKTVEEKSIKETLSLLFDDLKAQKLDLSKIYFKNDKSLT
DLSQQVFDDYSVIGTAVLEYITQQIAPKNLDNPSKKEQELIAKKTEKAKY
LSLETIKLALEEFNKHRDIDKQCRFEEILANFAAIPMIFDEIAQNKDNLA
QISIKYQNQGKKDLLQASAEDDVKAIKDLLDQTNNLLHKLKIFHISQSED
KANILDKDEHFYLVFEECYFELANIVPLYNKIRNYITQKPYSDEKFKLNF
ENSTLANGWDKNKEPDNTAILFIKDDKYYLGVMNKKNNKIFDDKAIKENK
GEGYKKIVYKLLPGANKMLPKVFFSAKSIKFYNPSEDILRIRNHSTHTKN
GSPQKGYEKFEFNIEDCRKFIDFYKQSISKHPEWKDFGFRFSDTQRYNSI
DEFYREVENQGYKLTFENISESYIDSVVNQGKLYLFQIYNKDFSAYSKGR
PNLHTLYWKALFDERNLQDVVYKLNGEAELFYRKQSIPKKITHPAKEAIA
NKNKDNPKKESVFEYDLIKDKRFTEDKFFFHCPITINFKSSGANKFNDEI
NLLLKEKANDVHILSIARGERHLAYYTLVDGKGNIIKQDTFNIIGNDRMK
TNYHDKLAAIEKDRDSARKDWKKINNIKEMKEGYLSQVVHEIAKLVIEYN
AIVVFEDLNFGFKRGRFKVEKQVYQKLEKMLIEKLNYLVFKDNEFDKTGG
VLRAYQLTAPFETFKKMGKQTGIIYYVPAGFTSKICPVTGFVNQLYPKYE
SVSKSQEFFSKFDKICYNLDKGYFEFSFDYKNFGDKAAKGKWTIASFGSR
LINFRNSDKNHNWDTREVYPTKELEKLLKDYSIEYGHGECIKAAICGESD
KKFFAKLTSVLNTILQMRNSKTGTELDYLISPVADVNGNFFDSRQAPKNM
PQDADANGAYHIGLKGLMLLGRIKNNQEGKKLNLVIKNEEYFEFVQNRNN

[0635] Francisella novicida Cpf1 E1006A (D917, A1006, and D1255 are bolded and underlined)

MSIYQEFVNKYSLSKTLRFELIPQGKTLENIKARGLILDDEKRAKDYKKA
KQIIDKYHQFFIEEILSSVCISEDLLQNYSDVYFKLKKSDDDNLQKDFKS
AKDTIKKQISEYIKDSEKFKNLFNQNLIDAKKGQESDLILWLKQSKDNGI
ELFKANSDITDIDEALEIIKSFKGWTTYFKGFHENRKNVYSSNDIPTSII
YRIVDDNLPKFLENKAKYESLKDKAPEAINYEQIKKDLAEELTFDIDYKT
SEVNQRVFSLDEVFEIANFNNYLNQSGITKFNTIIGGKFVNGENTKRKGI
NEYINLYSQQINDKTLKKYKMSVLFKQILSDTESKSFVIDKLEDDSDVVT
TMQSFYEQIAAFKTVEEKSIKETLSLLFDDLKAQKLDLSKIYFKNDKSLT
DLSQQVFDDYSVIGTAVLEYITQQIAPKNLDNPSKKEQELIAKKTEKAKY
LSLETIKLALEEFNKHRDIDKQCRFEEILANFAAIPMIFDEIAQNKDNLA
QISIKYQNQGKKDLLQASAEDDVKAIKDLLDQTNNLLHKLKIFHISQSED
KANILDKDEHFYLVFEECYFELANIVPLYNKIRNYITQKPYSDEKFKLNF
ENSTLANGWDKNKEPDNTAILFIKDDKYYLGVMNKKNNKIFDDKAIKENK
GEGYKKIVYKLLPGANKMLPKVFFSAKSIKFYNPSEDILRIRNHSTHTKN
GSPQKGYEKFEFNIEDCRKFIDFYKQSISKHPEWKDFGFRFSDTQRYNSI
DEFYREVENQGYKLTFENISESYIDSVVNQGKLYLFQIYNKDFSAYSKGR
PNLHTLYWKALFDERNLQDVVYKLNGEAELFYRKQSIPKKITHPAKEAIA
NKNKDNPKKESVFEYDLIKDKRFTEDKFFFHCPITINFKSSGANKFNDEI
NLLLKEKANDVHILSIDRGERHLAYYTLVDGKGNIIKQDTFNIIGNDRMK
TNYHDKLAAIEKDRDSARKDWKKINNIKEMKEGYLSQVVHEIAKLVIEYN
AIVVFADLNFGFKRGRFKVEKQVYQKLEKMLIEKLNYLVFKDNEFDKTGG
VLRAYQLTAPFETFKKMGKQTGIIYYVPAGFTSKICPVTGFVNQLYPKYE
SVSKSQEFFSKFDKICYNLDKGYFEFSFDYKNFGDKAAKGKWTIASFGSR
LINFRNSDKNHNWDTREVYPTKELEKLLKDYSIEYGHGECIKAAICGESD
KKFFAKLTSVLNTILQMRNSKTGTELDYLISPVADVNGNFFDSRQAPKNM
PQDADANGAYHIGLKGLMLLGRIKNNQEGKKLNLVIKNEEYFEFVQNRNN

[0636] Francisella novicida Cpf1 D1255A (D917, E1006, and A1255 are bolded and underlined)

MSIYQEFVNKYSLSKTLRFELIPQGKTLENIKARGLILDDEKRAKDYKKA
KQIIDKYHQFFIEEILSSVCISEDLLQNYSDVYFKLKKSDDDNLQKDFKS
AKDTIKKQISEYIKDSEKFKNLFNQNLIDAKKGQESDLILWLKQSKDNGI
ELFKANSDITDIDEALEIIKSFKGWTTYFKGFHENRKNVYSSNDIPTSII
YRIVDDNLPKFLENKAKYESLKDKAPEAINYEQIKKDLAEELTFDIDYKT
SEVNQRVFSLDEVFEIANFNNYLNQSGITKFNTIIGGKFVNGENTKRKGI
NEYINLYSQQINDKTLKKYKMSVLFKQILSDTESKSFVIDKLEDDSDVVT
TMQSFYEQIAAFKTVEEKSIKETLSLLFDDLKAQKLDLSKIYFKNDKSLT
DLSQQVFDDYSVIGTAVLEYITQQIAPKNLDNPSKKEQELIAKKTEKAKY
LSLETIKLALEEFNKHRDIDKQCRFEEILANFAAIPMIFDEIAQNKDNLA
QISIKYQNQGKKDLLQASAEDDVKAIKDLLDQTNNLLHKLKIFHISQSED
KANILDKDEHFYLVFEECYFELANIVPLYNKIRNYITQKPYSDEKFKLNF
ENSTLANGWDKNKEPDNTAILFIKDDKYYLGVMNKKNNKIFDDKAIKENK
GEGYKKIVYKLLPGANKMLPKVFFSAKSIKFYNPSEDILRIRNHSTHTKN
GSPQKGYEKFEFNIEDCRKFIDFYKQSISKHPEWKDFGFRFSDTQRYNSI
DEFYREVENQGYKLTFENISESYIDSVVNQGKLYLFQIYNKDFSAYSKGR
PNLHTLYWKALFDERNLQDVVYKLNGEAELFYRKQSIPKKITHPAKEAIA
NKNKDNPKKESVFEYDLIKDKRFTEDKFFFHCPITINFKSSGANKFNDEI
NLLLKEKANDVHILSIDRGERHLAYYTLVDGKGNIIKQDTFNIIGNDRMK
TNYHDKLAAIEKDRDSARKDWKKINNIKEMKEGYLSQVVHEIAKLVIEYN
AIVVFEDLNFGFKRGRFKVEKQVYQKLEKMLIEKLNYLVFKDNEFDKTGG
VLRAYQLTAPFETFKKMGKQTGIIYYVPAGFTSKICPVTGFVNQLYPKYE
SVSKSQEFFSKFDKICYNLDKGYFEFSFDYKNFGDKAAKGKWTIASFGSR
LINFRNSDKNHNWDTREVYPTKELEKLLKDYSIEYGHGECIKAAICGESD
KKFFAKLTSVLNTILQMRNSKTGTELDYLISPVADVNGNFFDSRQAPKNM
PQDAAANGAYHIGLKGLMLLGRIKNNQEGKKLNLVIKNEEYFEFVQNRNN

[0637] Francisella novicida Cpf1 D917A/E1006A (A917, A1006, and D1255 are bolded and underlined)

MSIYQEFVNKYSLSKTLRFELIPQGKTLENIKARGLILDDEKRAKDYKKA
KQIIDKYHQFFIEEILSSVCISEDLLQNYSDVYFKLKKSDDDNLQKDFKS
AKDTIKKQISEYIKDSEKFKNLFNQNLIDAKKGQESDLILWLKQSKDNGI
ELFKANSDITDIDEALEIIKSFKGWTTYFKGFHENRKNVYSSNDIPTSII
YRIVDDNLPKFLENKAKYESLKDKAPEAINYEQIKKDLAEELTFDIDYKT
SEVNQRVFSLDEVFEIANFNNYLNQSGITKFNTIIGGKFVNGENTKRKGI
NEYINLYSQQINDKTLKKYKMSVLFKQILSDTESKSFVIDKLEDDSDVVT
TMQSFYEQIAAFKTVEEKSIKETLSLLFDDLKAQKLDLSKIYFKNDKSLT
DLSQQVFDDYSVIGTAVLEYITQQIAPKNLDNPSKKEQELIAKKTEKAKY
LSLETIKLALEEFNKHRDIDKQCRFEEILANFAAIPMIFDEIAQNKDNLA
QISIKYQNQGKKDLLQASAEDDVKAIKDLLDQTNNLLHKLKIFHISQSED
KANILDKDEHFYLVFEECYFELANIVPLYNKIRNYITQKPYSDEKFKLNF
ENSTLANGWDKNKEPDNTAILFIKDDKYYLGVMNKKNNKIFDDKAIKENK
GEGYKKIVYKLLPGANKMLPKVFFSAKSIKFYNPSEDILRIRNHSTHTKN
GSPQKGYEKFEFNIEDCRKFIDFYKQSISKHPEWKDFGFRFSDTQRYNSI
DEFYREVENQGYKLTFENISESYIDSVVNQGKLYLFQIYNKDFSAYSKGR
PNLHTLYWKALFDERNLQDVVYKLNGEAELFYRKQSIPKKITHPAKEAIA
NKNKDNPKKESVFEYDLIKDKRFTEDKFFFHCPITINFKSSGANKFNDEI
NLLLKEKANDVHILSIARGERHLAYYTLVDGKGNIIKQDTFNIIGNDRMK
TNYHDKLAAIEKDRDSARKDWKKINNIKEMKEGYLSQVVHEIAKLVIEYN
AIVVFADLNFGFKRGRFKVEKQVYQKLEKMLIEKLNYLVFKDNEFDKTGG
VLRAYQLTAPFETFKKMGKQTGIIYYVPAGFTSKICPVTGFVNQLYPKYE
SVSKSQEFFSKFDKICYNLDKGYFEFSFDYKNFGDKAAKGKWTIASFGSR
LINFRNSDKNHNWDTREVYPTKELEKLLKDYSIEYGHGECIKAAICGESD
KKFFAKLTSVLNTILQMRNSKTGTELDYLISPVADVNGNFFDSRQAPKNM
PQDADANGAYHIGLKGLMLLGRIKNNQEGKKLNLVIKNEEYFEFVQNRNN

[0638] Francisella novicida Cpf1 D917A/D1255A (A917, E1006, and A1255 are bolded and underlined)

MSIYQEFVNKYSLSKTLRFELIPQGKTLENIKARGLILDDEKRAKDYKKA
KQIIDKYHQFFIEEILSSVCISEDLLQNYSDVYFKLKKSDDDNLQKDFKS
AKDTIKKQISEYIKDSEKFKNLFNQNLIDAKKGQESDLILWLKQSKDNGI
ELFKANSDITDIDEALEIIKSFKGWTTYFKGFHENRKNVYSSNDIPTSII
YRIVDDNLPKFLENKAKYESLKDKAPEAINYEQIKKDLAEELTFDIDYKT
SEVNQRVFSLDEVFEIANFNNYLNQSGITKFNTIIGGKFVNGENTKRKGI
NEYINLYSQQINDKTLKKYKMSVLFKQILSDTESKSFVIDKLEDDSDVVT
TMQSFYEQIAAFKTVEEKSIKETLSLLFDDLKAQKLDLSKIYFKNDKSLT
DLSQQVFDDYSVIGTAVLEYITQQIAPKNLDNPSKKEQELIAKKTEKAKY
LSLETIKLALEEFNKHRDIDKQCRFEEILANFAAIPMIFDEIAQNKDNLA
QISIKYQNQGKKDLLQASAEDDVKAIKDLLDQTNNLLHKLKIFHISQSED
KANILDKDEHFYLVFEECYFELANIVPLYNKIRNYITQKPYSDEKFKLNF
ENSTLANGWDKNKEPDNTAILFIKDDKYYLGVMNKKNNKIFDDKAIKENK
GEGYKKIVYKLLPGANKMLPKVFFSAKSIKFYNPSEDILRIRNHSTHTKN
GSPQKGYEKFEFNIEDCRKFIDFYKQSISKHPEWKDFGFRFSDTQRYNSI
DEFYREVENQGYKLTFENISESYIDSVVNQGKLYLFQIYNKDFSAYSKGR
PNLHTLYWKALFDERNLQDVVYKLNGEAELFYRKQSIPKKITHPAKEAIA
NKNKDNPKKESVFEYDLIKDKRFTEDKFFFHCPITINFKSSGANKFNDEI
NLLLKEKANDVHILSIARGERHLAYYTLVDGKGNIIKQDTFNIIGNDRMK
TNYHDKLAAIEKDRDSARKDWKKINNIKEMKEGYLSQVVHEIAKLVIEYN
AIVVFEDLNFGFKRGRFKVEKQVYQKLEKMLIEKLNYLVFKDNEFDKTGG
VLRAYQLTAPFETFKKMGKQTGIIYYVPAGFTSKICPVTGFVNQLYPKYE
SVSKSQEFFSKFDKICYNLDKGYFEFSFDYKNFGDKAAKGKWTIASFGSR
LINFRNSDKNHNWDTREVYPTKELEKLLKDYSIEYGHGECIKAAICGESD
KKFFAKLTSVLNTILQMRNSKTGTELDYLISPVADVNGNFFDSRQAPKNM
PQDAAANGAYHIGLKGLMLLGRIKNNQEGKKLNLVIKNEEYFEFVQNRNN

[0639] Francisella novicida Cpf1 E1006A/D1255A (D917, A1006, and A1255 are bolded and underlined)

MSIYQEFVNKYSLSKTLRFELIPQGKTLENIKARGLILDDEKRAKDYKKA
KQIIDKYHQFFIEEILSSVCISEDLLQNYSDVYFKLKKSDDDNLQKDFKS
AKDTIKKQISEYIKDSEKFKNLFNQNLIDAKKGQESDLILWLKQSKDNGI
ELFKANSDITDIDEALEIIKSFKGWTTYFKGFHENRKNVYSSNDIPTSII
YRIVDDNLPKFLENKAKYESLKDKAPEAINYEQIKKDLAEELTFDIDYKT
SEVNQRVFSLDEVFEIANFNNYLNQSGITKFNTIIGGKFVNGENTKRKGI
NEYINLYSQQINDKTLKKYKMSVLFKQILSDTESKSFVIDKLEDDSDVVT
TMQSFYEQIAAFKTVEEKSIKETLSLLFDDLKAQKLDLSKIYFKNDKSLT
DLSQQVFDDYSVIGTAVLEYITQQIAPKNLDNPSKKEQELIAKKTEKAKY
LSLETIKLALEEFNKHRDIDKQCRFEEILANFAAIPMIFDEIAQNKDNLA
QISIKYQNQGKKDLLQASAEDDVKAIKDLLDQTNNLLHKLKIFHISQSED
KANILDKDEHFYLVFEECYFELANIVPLYNKIRNYITQKPYSDEKFKLNF
ENSTLANGWDKNKEPDNTAILFIKDDKYYLGVMNKKNNKIFDDKAIKENK
GEGYKKIVYKLLPGANKMLPKVFFSAKSIKFYNPSEDILRIRNHSTHTKN
GSPQKGYEKFEFNIEDCRKFIDFYKQSISKHPEWKDFGFRFSDTQRYNSI
DEFYREVENQGYKLTFENISESYIDSVVNQGKLYLFQIYNKDFSAYSKGR
PNLHTLYWKALFDERNLQDVVYKLNGEAELFYRKQSIPKKITHPAKEAIA
NKNKDNPKKESVFEYDLIKDKRFTEDKFFFHCPITINFKSSGANKFNDEI
NLLLKEKANDVHILSIDRGERHLAYYTLVDGKGNIIKQDTFNIIGNDRMK
TNYHDKLAAIEKDRDSARKDWKKINNIKEMKEGYLSQVVHEIAKLVIEYN
AIVVFADLNFGFKRGRFKVEKQVYQKLEKMLIEKLNYLVFKDNEFDKTGG
VLRAYQLTAPFETFKKMGKQTGIIYYVPAGFTSKICPVTGFVNQLYPKYE
SVSKSQEFFSKFDKICYNLDKGYFEFSFDYKNFGDKAAKGKWTIASFGSR
LINFRNSDKNHNWDTREVYPTKELEKLLKDYSIEYGHGECIKAAICGESD
KKFFAKLTSVLNTILQMRNSKTGTELDYLISPVADVNGNFFDSRQAPKNM
PQDAAANGAYHIGLKGLMLLGRIKNNQEGKKLNLVIKNEEYFEFVQNRNN

[0640] Francisella novicida Cpf1 D917A/E1006A/D1255A (A917, A1006, and A1255 are bolded and underlined)

MSIYQEFVNKYSLSKTLRFELIPQGKTLENIKARGLILDDEKRAKDYKKA
KQIIDKYHQFFIEEILSSVCISEDLLQNYSDVYFKLKKSDDDNLQKDFKS
AKDTIKKQISEYIKDSEKFKNLFNQNLIDAKKGQESDLILWLKQSKDNGI
ELFKANSDITDIDEALEIIKSFKGWTTYFKGFHENRKNVYSSNDIPTSII
YRIVDDNLPKFLENKAKYESLKDKAPEAINYEQIKKDLAEELTFDIDYKT
SEVNQRVFSLDEVFEIANFNNYLNQSGITKFNTIIGGKFVNGENTKRKGI
NEYINLYSQQINDKTLKKYKMSVLFKQILSDTESKSFVIDKLEDDSDVVT
TMQSFYEQIAAFKTVEEKSIKETLSLLFDDLKAQKLDLSKIYFKNDKSLT
DLSQQVFDDYSVIGTAVLEYITQQIAPKNLDNPSKKEQELIAKKTEKAKY
LSLETIKLALEEFNKHRDIDKQCRFEEILANFAAIPMIFDEIAQNKDNLA
QISIKYQNQGKKDLLQASAEDDVKAIKDLLDQTNNLLHKLKIFHISQSED
KANILDKDEHFYLVFEECYFELANIVPLYNKIRNYITQKPYSDEKFKLNF
ENSTLANGWDKNKEPDNTAILFIKDDKYYLGVMNKKNNKIFDDKAIKENK
GEGYKKIVYKLLPGANKMLPKVFFSAKSIKFYNPSEDILRIRNHSTHTKN
GSPQKGYEKFEFNIEDCRKFIDFYKQSISKHPEWKDFGFRFSDTQRYNSI
DEFYREVENQGYKLTFENISESYIDSVVNQGKLYLFQIYNKDFSAYSKGR
PNLHTLYWKALFDERNLQDVVYKLNGEAELFYRKQSIPKKITHPAKEAIA
NKNKDNPKKESVFEYDLIKDKRFTEDKFFFHCPITINFKSSGANKFNDEI
NLLLKEKANDVHILSIARGERHLAYYTLVDGKGNIIKQDTFNIIGNDRMK
TNYHDKLAAIEKDRDSARKDWKKINNIKEMKEGYLSQVVHEIAKLVIEYN
AIVVFADLNFGFKRGRFKVEKQVYQKLEKMLIEKLNYLVFKDNEFDKTGG
VLRAYQLTAPFETFKKMGKQTGIIYYVPAGFTSKICPVTGFVNQLYPKYE
SVSKSQEFFSKFDKICYNLDKGYFEFSFDYKNFGDKAAKGKWTIASFGSR
LINFRNSDKNHNWDTREVYPTKELEKLLKDYSIEYGHGECIKAAICGESD
KKFFAKLTSVLNTILQMRNSKTGTELDYLISPVADVNGNFFDSRQAPKNM
PQDAAANGAYHIGLKGLMLLGRIKNNQEGKKLNLVIKNEEYFEFVQNRNN

[0641] The Cas9 nuclease has two functional endonuclease domains: RuvC and HNH. Cas9 undergoes a conformational change upon target binding that positions the nuclease domains to cleave opposite strands of the target DNA. The end result of Cas9-mediated DNA cleavage is a double-strand break (DSB) within the target DNA (˜3-4 nucleotides upstream of the PAM sequence). The resulting DSB is then repaired by one of two general repair pathways: (1) the efficient but error-prone non-homologous end joining (NHEJ) pathway; or (2) the less efficient but high-fidelity homology directed repair (HDR) pathway.

[0642] The “efficiency” of non-homologous end joining (NHEJ) and/or homology directed repair (HDR) can be calculated by any convenient method. For example, in some cases, efficiency can be expressed in terms of percentage of successful HDR. For example, a surveyor nuclease assay can be used to generate cleavage products and the ratio of products to substrate can be used to calculate the percentage. For example, a surveyor nuclease enzyme can be used that directly cleaves DNA containing a newly integrated restriction sequence as the result of successful HDR. More cleaved substrate indicates a greater percent HDR (a greater efficiency of HDR). As an illustrative example, a fraction (percentage) of HDR can be calculated using the following equation [(cleavage products)/(substrate plus cleavage products)] (e.g., (b+c)/(a+b+c), where “a” is the band intensity of DNA substrate and “b” and “c” are the cleavage products).

[0643] In some cases, efficiency can be expressed in terms of percentage of successful NHEJ. For example, a T7 endonuclease I assay can be used to generate cleavage products and the ratio of products to substrate can be used to calculate the percentage NHEJ. T7 endonuclease I cleaves mismatched heteroduplex DNA which arises from hybridization of wild-type and mutant DNA strands (NHEJ generates small random insertions or deletions (indels) at the site of the original break). More cleavage indicates a greater percent NHEJ (a greater efficiency of NHEJ). As an illustrative example, a fraction (percentage) of NHEJ can be calculated using the following equation: (1−(1−(b+c)/(a+b+c))^{1/2})×100, where “a” is the band intensity of DNA substrate and “b” and “c” are the cleavage products (Ran et. al., 2013 Sep. 12; 154(6):1380-9; and Ran et al., Nat Protoc. 2013 November; 8(11): 2281-2308).

[0644] The NHEJ repair pathway is the most active repair mechanism, and it frequently causes small nucleotide insertions or deletions (indels) at the DSB site. The randomness of NHEJ-mediated DSB repair has important practical implications, because a population of cells expressing Cas9 and a gRNA or a guide polynucleotide can result in a diverse array of mutations. In most cases, NHEJ gives rise to small indels in the target DNA that result in amino acid deletions, insertions, or frameshift mutations leading to premature stop codons within the open reading frame (ORF) of the targeted gene. The ideal end result is a loss-of-function mutation within the targeted gene.

[0645] While NHEJ-mediated DSB repair often disrupts the open reading frame of the gene, homology directed repair (HDR) can be used to generate specific nucleotide changes ranging from a single nucleotide change to large insertions like the addition of a fluorophore or tag.

[0646] In order to utilize HDR for gene editing, a DNA repair template containing the desired sequence can be delivered into the cell type of interest with the gRNA(s) and Cas9 or Cas9 nickase. The repair template can contain the desired edit as well as additional homologous sequence immediately upstream and downstream of the target (termed left & right homology arms). The length of each homology arm can be dependent on the size of the change being introduced, with larger insertions requiring longer homology arms. The repair template can be a single-stranded oligonucleotide, double-stranded oligonucleotide, or a double-stranded DNA plasmid. The efficiency of HDR is generally low (<10% of modified alleles) even in cells that express Cas9, gRNA and an exogenous repair template. The efficiency of HDR can be enhanced by synchronizing the cells, since HDR takes place during the S and G2 phases of the cell cycle. Chemically or genetically inhibiting genes involved in NHEJ can also increase HDR frequency.

[0647] In some embodiments, Cas9 is a modified Cas9. A given gRNA targeting sequence can have additional sites throughout the genome where partial homology exists. These sites are called off-targets and need to be considered when designing a gRNA. In addition to optimizing gRNA design, CRISPR specificity can also be increased through modifications to Cas9. Cas9 generates double-strand breaks (DSBs) through the combined activity of two nuclease domains, RuvC and HNH. Cas9 nickase, a D10A mutant of SpCas9, retains one nuclease domain and generates a DNA nick rather than a DSB. The nickase system can also be combined with HDR-mediated gene editing for specific gene edits.

[0648] In some cases, Cas9 is a variant Cas9 protein. A variant Cas9 polypeptide has an amino acid sequence that is different by one amino acid (e.g., has a deletion, insertion, substitution, fusion) when compared to the amino acid sequence of a wild type Cas9 protein. In some instances, the variant Cas9 polypeptide has an amino acid change (e.g., deletion, insertion, or substitution) that reduces the nuclease activity of the Cas9 polypeptide. For example, in some instances, the variant Cas9 polypeptide has less than 50%, less than 40%, less than 30%, less than 20%, less than 10%, less than 5%, or less than 1% of the nuclease activity of the corresponding wild-type Cas9 protein. In some cases, the variant Cas9 protein has no substantial nuclease activity. When a subject Cas9 protein is a variant Cas9 protein that has no substantial nuclease activity, it can be referred to as “dCas9.”

[0649] In some cases, a variant Cas9 protein has reduced nuclease activity. For example, a variant Cas9 protein exhibits less than about 20%, less than about 15%, less than about 10%, less than about 5%, less than about 1%, or less than about 0.1%, of the endonuclease activity of a wild-type Cas9 protein, e.g., a wild-type Cas9 protein.

[0650] In some cases, a variant Cas9 protein can cleave the complementary strand of a guide target sequence but has reduced ability to cleave the non-complementary strand of a double stranded guide target sequence. For example, the variant Cas9 protein can have a mutation (amino acid substitution) that reduces the function of the RuvC domain. As a non-limiting example, in some embodiments, a variant Cas9 protein has a D10A (aspartate to alanine at amino acid position 10) and can therefore cleave the complementary strand of a double stranded guide target sequence but has reduced ability to cleave the non-complementary strand of a double stranded guide target sequence (thus resulting in a single strand break (SSB) instead of a double strand break (DSB) when the variant Cas9 protein cleaves a double stranded target nucleic acid) (see, for example, Jinek et al., Science. 2012 Aug. 17; 337(6096):816-21).

[0651] In some cases, a variant Cas9 protein can cleave the non-complementary strand of a double stranded guide target sequence but has reduced ability to cleave the complementary strand of the guide target sequence. For example, the variant Cas9 protein can have a mutation (amino acid substitution) that reduces the function of the HNH domain (RuvC/HNH/RuvC domain motifs). As a non-limiting example, in some embodiments, the variant Cas9 protein has an H840A (histidine to alanine at amino acid position 840) mutation and can therefore cleave the non-complementary strand of the guide target sequence but has reduced ability to cleave the complementary strand of the guide target sequence (thus resulting in a SSB instead of a DSB when the variant Cas9 protein cleaves a double stranded guide target sequence). Such a Cas9 protein has a reduced ability to cleave a guide target sequence (e.g., a single stranded guide target sequence) but retains the ability to bind a guide target sequence (e.g., a single stranded guide target sequence).

[0652] In some cases, a variant Cas9 protein has a reduced ability to cleave both the complementary and the non-complementary strands of a double stranded target DNA. As a non-limiting example, in some cases, the variant Cas9 protein harbors both the D10A and the H840A mutations such that the polypeptide has a reduced ability to cleave both the complementary and the non-complementary strands of a double stranded target DNA. Such a Cas9 protein has a reduced ability to cleave a target DNA (e.g., a single stranded target DNA) but retains the ability to bind a target DNA (e.g., a single stranded target DNA).

[0653] As another non-limiting example, in some cases, the variant Cas9 protein harbors W476A and W1126A mutations such that the polypeptide has a reduced ability to cleave a target DNA. Such a Cas9 protein has a reduced ability to cleave a target DNA (e.g., a single stranded target DNA) but retains the ability to bind a target DNA (e.g., a single stranded target DNA).

[0654] As another non-limiting example, in some cases, the variant Cas9 protein harbors P475A, W476A, N477A, D1125A, W1126A, and D1127A mutations such that the polypeptide has a reduced ability to cleave a target DNA. Such a Cas9 protein has a reduced ability to cleave a target DNA (e.g., a single stranded target DNA) but retains the ability to bind a target DNA (e.g., a single stranded target DNA).

[0655] As another non-limiting example, in some cases, the variant Cas9 protein harbors H840A, W476A, and W1126A, mutations such that the polypeptide has a reduced ability to cleave a target DNA. Such a Cas9 protein has a reduced ability to cleave a target DNA (e.g., a single stranded target DNA) but retains the ability to bind a target DNA (e.g., a single stranded target DNA). As another non-limiting example, in some cases, the variant Cas9 protein harbors H840A, D10A, W476A, and W1126A, mutations such that the polypeptide has a reduced ability to cleave a target DNA. Such a Cas9 protein has a reduced ability to cleave a target DNA (e.g., a single stranded target DNA) but retains the ability to bind a target DNA (e.g., a single stranded target DNA). In some embodiments, the variant Cas9 has restored catalytic His residue at position 840 in the Cas9 HNH domain (A840H).

[0656] As another non-limiting example, in some cases, the variant Cas9 protein harbors, H840A, P475A, W476A, N477A, D1125A, W1126A, and D1127A mutations such that the polypeptide has a reduced ability to cleave a target DNA. Such a Cas9 protein has a reduced ability to cleave a target DNA (e.g., a single stranded target DNA) but retains the ability to bind a target DNA (e.g., a single stranded target DNA). As another non-limiting example, in some cases, the variant Cas9 protein harbors D10A, H840A, P475A, W476A, N477A, D1125A, W1126A, and D1127A mutations such that the polypeptide has a reduced ability to cleave a target DNA. Such a Cas9 protein has a reduced ability to cleave a target DNA (e.g., a single stranded target DNA) but retains the ability to bind a target DNA (e.g., a single stranded target DNA). In some cases, when a variant Cas9 protein harbors W476A and W 1126A mutations or when the variant Cas9 protein harbors P475A, W476A, N477A, D1125A, W1126A, and D1127A mutations, the variant Cas9 protein does not bind efficiently to a PAM sequence. Thus, in some such cases, when such a variant Cas9 protein is used in a method of binding, the method does not require a PAM sequence. In other words, in some cases, when such a variant Cas9 protein is used in a method of binding, the method can include a guide RNA, but the method can be performed in the absence of a PAM sequence (and the specificity of binding is therefore provided by the targeting segment of the guide RNA). Other residues can be mutated to achieve the above effects (i.e., inactivate one or the other nuclease portions). As non-limiting examples, residues D10, G12, G17, E762, H840, N854, N863, H982, H983, A984, D986, and/or A987 can be altered (i.e., substituted). Also, mutations other than alanine substitutions are suitable.

[0657] In some embodiments, a variant Cas9 protein that has reduced catalytic activity (e.g., when a Cas9 protein has a D10, G12, G17, E762, H840, N854, N863, H982, H983, A984, D986, and/or a A987 mutation, e.g., D10A, G12A, G17A, E762A, H840A, N854A, N863A, H982A, H983A, A984A, and/or D986A), the variant Cas9 protein can still bind to target DNA in a site-specific manner (because it is still guided to a target DNA sequence by a guide RNA) as long as it retains the ability to interact with the guide RNA.

[0658] In some embodiments, the variant Cas protein can be spCas9, spCas9-VRQR, spCas9-VRER, xCas9 (sp), saCas9, saCas9-KKH, spCas9-MQKSER, spCas9-LRKIQK, or spCas9-LRVSQL.

[0659] Alternatives to S. pyogenes Cas9 can include RNA-guided endonucleases from the Cpf1 family that display cleavage activity in mammalian cells. CRISPR from Prevotella and Francisella 1 (CRISPR/Cpf1) is a DNA-editing technology analogous to the CRISPR/Cas9 system. Cpf1 is an RNA-guided endonuclease of a class II CRISPR/Cas system. This acquired immune mechanism is found in Prevotella and Francisella bacteria. Cpf1 genes are associated with the CRISPR locus, coding for an endonuclease that use a guide RNA to find and cleave viral DNA. Cpf1 is a smaller and simpler endonuclease than Cas9, overcoming some of the CRISPR/Cas9 system limitations. Unlike Cas9 nucleases, the result of Cpf1-mediated DNA cleavage is a double-strand break with a short 3′ overhang. Cpf1's staggered cleavage pattern can open up the possibility of directional gene transfer, analogous to traditional restriction enzyme cloning, which can increase the efficiency of gene editing. Like the Cas9 variants and orthologues described above, Cpf1 can also expand the number of sites that can be targeted by CRISPR to AT-rich regions or AT-rich genomes that lack the NGG PAM sites favored by SpCas9. The Cpf1 locus contains a mixed alpha/beta domain, a RuvC-I followed by a helical region, a RuvC-II and a zinc finger-like domain. The Cpf1 protein has a RuvC-like endonuclease domain that is similar to the RuvC domain of Cas9. Furthermore, Cpf1 does not have a HNH endonuclease domain, and the N-terminal of Cpf1 does not have the alpha-helical recognition lobe of Cas9. Cpf1 CRISPR-Cas domain architecture shows that Cpf1 is functionally unique, being classified as Class 2, type V CRISPR system. The Cpf1 loci encode Cas1, Cas2 and Cas4 proteins more similar to types I and III than from type II systems. Functional Cpf1 doesn't need the trans-activating CRISPR RNA (tracrRNA), therefore, only CRISPR (crRNA) is required. This benefits genome editing because Cpf1 is not only smaller than Cas9, but also it has a smaller sgRNA molecule (proximately half as many nucleotides as Cas9). The Cpf1-crRNA complex cleaves target DNA or RNA by identification of a protospacer adjacent motif 5′-YTN-3′ in contrast to the G-rich PAM targeted by Cas9. After identification of PAM, Cpf1 introduces a sticky-end-like DNA double-stranded break of 4 or 5 nucleotides overhang.

Fusion Proteins Comprising Two napDNAbp, a Deaminase Domain

[0660] Some aspects of the disclosure provide fusion proteins comprising a napDNAbp domain having nickase activity (e.g., nCas domain) and a catalytically inactive napDNAbp (e.g., dCas domain) and a nucleobase editor (e.g., adenosine deaminase domain, cytidine deaminase domain), where at least the napDNAbp domains are joined by a linker. It should be appreciated that the Cas domains may be any of the Cas domains or Cas proteins (e.g., dCas9 and nCas9) provided herein. In some embodiments, any of the Cas domains, DNA binding protein domains, or Cas proteins include, without limitation, Cas9 (e.g., dCas9 and nCas9), Cas12a/Cpf1, Cas12b/C2c1, Cas12c/C2c3, Cas12d/CasY, Cas12e/CasX, Cas12g, Cas12h, and Cas12i. One example of a programmable polynucleotide-binding protein that has different PAM specificity than Cas9 is Clustered Regularly Interspaced Short Palindromic Repeats from Prevotella and Francisella1 (Cpf1). Similar to Cas9, Cpf1 is also a class 2 CRISPR effector. For example, and without limitation, in some embodiments, the fusion protein comprises the structure, where the deaminase is adenosine deaminase or cytidine deaminase:

NH₂-[deaminase]-[nCas domain]-[dCas domain]-COOH;
NH₂-[deaminase]-[dCas domain]-[nCas domain]-COOH;
NH₂-[nCas domain]-[dCas domain]-[deaminase]-COOH;
NH₂-[dCas domain]-[nCas domain]-[deaminase]-COOH;
NH₂-[nCas domain]-[deaminase]-[dCas domain]-COOH;
NH₂-[dCas domain]-[deaminase]-[nCas domain]-COOH;

[0661] In some embodiments, the “-” used in the general architecture above indicates the presence of an optional linker. In some embodiments, the deaminase and a napDNAbp (e.g., Cas domain) are not joined by a linker sequence, but are directly fused. In some embodiments, a linker is present between the deaminase domain and the napDNAbp. In some embodiments, the deaminase or other nucleobase editor is directly fused to dCas and a linker joins dCas and nCas9. In some embodiments, the deaminase and the napDNAbps are fused via any of the linkers provided herein. For example, in some embodiments the deaminase and the napDNAbp are fused via any of the linkers provided below in the section entitled “Linkers”. In some embodiments, the dCas domain and the deaminase are immediately adjacent and the nCas domain is joined to these domains (either 5′ or 3′) via a linker.

### Protospacer Adjacent Motif

[0662] The term “protospacer adjacent motif (PAM)” or PAM-like motif refers to a 2-6 base pair DNA sequence immediately following the DNA sequence targeted by the Cas9 nuclease in the CRISPR bacterial adaptive immune system. In some embodiments, the PAM can be a 5′ PAM (i.e., located upstream of the 5′ end of the protospacer). In other embodiments, the PAM can be a 3′ PAM (i.e., located downstream of the 5′ end of the protospacer).

[0663] The PAM sequence is essential for target binding, but the exact sequence depends on a type of Cas protein.

[0664] A base editor provided herein can comprise a CRISPR protein-derived domain that is capable of binding a nucleotide sequence that contains a canonical or non-canonical protospacer adjacent motif (PAM) sequence. A PAM site is a nucleotide sequence in proximity to a target polynucleotide sequence. Some aspects of the disclosure provide for base editors comprising all or a portion of CRISPR proteins that have different PAM specificities. For example, typically Cas9 proteins, such as Cas9 from S. pyogenes (spCas9), require a canonical NGG PAM sequence to bind a particular nucleic acid region, where the “N” in “NGG” is adenine (A), thymine (T), guanine (G), or cytosine (C), and the G is guanine. A PAM can be CRISPR protein-specific and can be different between different base editors comprising different CRISPR protein-derived domains. A PAM can be 5′ or 3′ of a target sequence. A PAM can be upstream or downstream of a target sequence. A PAM can be 1, 2, 3, 4, 5, 6, 7, 8, 9, 10 or more nucleotides in length. Often, a PAM is between 2-6 nucleotides in length. Several PAM variants are described in Table 1.

[0665] In some embodiments, the SpCas9 has specificity for PAM nucleic acid sequence 5′-NGC-3′ or 5′-NGG-3′. In various embodiments of the above aspects, the SpCas9 is a Cas9 or Cas9 variant listed in Table 1. In various embodiments of the above aspects, the modified SpCas9 is spCas9-MQKFRAER. In some embodiments, the variant Cas protein can be spCas9, spCas9-VRQR, spCas9-VRER, xCas9 (sp), saCas9, saCas9-KKH, SpCas9-MQKFRAER, spCas9-MQKSER, spCas9-LRKIQK, or spCas9-LRVSQL. In one specific embodiment, a modified SpCas9 including amino acid substitutions D1135M, S1136Q, G1218K, E1219F, A1322R, D1332A, R1335E, and T1337R (SpCas9-MQKFRAER) and having specificity for the altered PAM 5′-NGC-3′ is used.

[0666] In some embodiments, the PAM is NGT. In some embodiments, the NGT PAM is a variant. In some embodiments, the NGT PAM variant is created through targeted mutations at one or more residues 1335, 1337, 1135, 1136, 1218, and/or 1219. In some embodiments, the NGT PAM variant is created through targeted mutations at one or more residues 1219, 1335, 1337, 1218. In some embodiments, the NGT PAM variant is created through targeted mutations at one or more residues 1135, 1136, 1218, 1219, and 1335. In some embodiments, the NGT PAM variant is selected from the set of targeted mutations provided in Tables 4 and 5 below.

TABLE 4
NGT PAM Variant Mutations at
residues 1219, 1335, 1337, 1218

| Variant | E1219V | R1335Q | T1337 | G1218 |
|---|---|---|---|---|
| 1 | F | V | T | |
| 2 | F | V | R | |
| 3 | F | V | Q | |
| 4 | F | V | L | |
| 5 | F | V | T | R |
| 6 | F | V | R | R |
| 7 | F | V | Q | R |
| 8 | F | V | L | R |
| 9 | L | L | T | |
| 10 | L | L | R | |
| 11 | L | L | Q | |
| 12 | L | L | L | |
| 13 | F | I | T | |
| 14 | F | I | R | |
| 15 | F | I | Q | |
| 16 | F | I | L | |
| 17 | F | G | C | |
| 18 | H | L | N | |
| 19 | F | G | C | A |
| 20 | H | L | N | V |
| 21 | L | A | W | |
| 22 | L | A | F | |
| 23 | L | A | Y | |
| 24 | I | A | W | |
| 25 | I | A | F | |
| 26 | I | A | Y | |

TABLE 5
NGT PAM Variant Mutations at residues
1135, 1136, 1218, 1219, and 1335

| Variant | D1135L | S1136R | G1218S | E1219V | R1335Q |
|---|---|---|---|---|---|
| 27 | G | | | | |
| 28 | V | | | | |
| 29 | I | | | | |
| 30 | | A | | | |
| 31 | | W | | | |
| 32 | | H | | | |
| 33 | | K | | | |
| 34 | | | K | | |
| 35 | | | R | | |
| 36 | | | Q | | |
| 37 | | | T | | |
| 38 | | | N | | |
| 39 | | | | I | |
| 40 | | | | A | |
| 41 | | | | N | |
| 42 | | | | Q | |
| 43 | | | | G | |
| 44 | | | | L | |
| 45 | | | | S | |
| 46 | | | | T | |
| 47 | | | | | L |
| 48 | | | | | I |
| 49 | | | | | V |
| 50 | | | | | N |
| 51 | | | | | S |
| 52 | | | | | T |
| 53 | | | | | F |
| 54 | | | | | Y |
| 55 | N1286Q | I1331F | | | |

[0667] In some embodiments, the NGT PAM variant is selected from variant 5, 7, 28, 31, or 36 in Tables 2 and 3. In some embodiments, the variants have improved NGT PAM recognition.

[0668] In some embodiments, the NGT PAM variants have mutations at residues 1219, 1335, 1337, and/or 1218. In some embodiments, the NGT PAM variant is selected with mutations for improved recognition from the variants provided in Table 6 below.

TABLE 6
NGT PAM Variant Mutations at residues 1219, 1335, 1337, and 1218

| Variant | E1219V | R1335Q | T1337 | G1218 |
|---|---|---|---|---|
| 1 | F | V | T | |
| 2 | F | V | R | |
| 3 | F | V | Q | |
| 4 | F | V | L | |
| 5 | F | V | T | R |
| 6 | F | V | R | R |
| 7 | F | V | Q | R |
| 8 | F | V | L | R |

[0669] In some embodiments, the NGT PAM is selected from the variants provided in Table 7 below.

TABLE 7
NGT PAM variants

| | NGTN | | | | | | | |
|---|---|---|---|---|---|---|---|---|
| | variant | D1135 | S1136 | G1218 | E1219 | A1322R | R1335 | T1337 |
| Variant 1 | LRKIQK | L | R | K | I | — | Q | K |
| Variant 2 | LRSVQK | L | R | S | V | — | Q | K |
| Variant 3 | LRSVQL | L | R | S | V | — | Q | L |
| Variant 4 | LRKIRQK | L | R | K | I | R | Q | K |
| Variant 5 | LRSVRQK | L | R | S | V | R | Q | K |
| Variant 6 | LRSVRQL | L | R | S | V | R | Q | L |

[0670] In some embodiments, the Cas9 domain is a Cas9 domain from Streptococcus pyogenes (SpCas9). In some embodiments, the SpCas9 domain is a nuclease active SpCas9, a nuclease inactive SpCas9 (SpCas9d), or a SpCas9 nickase (SpCas9n). In some embodiments, the SpCas9 comprises a D9X mutation, or a corresponding mutation in any of the amino acid sequences provided herein may be fused with any of the cytidine deaminases or adenosine deaminases provided herein

[0671] In some embodiments, the SpCas9 domain comprises one or more of a D1135X, a R1335X, and a T1336X mutation, or a corresponding mutation in any of the amino acid sequences provided herein, wherein X is any amino acid. In some embodiments, the SpCas9 domain comprises one or more of a D1135E, R1335Q, and T1336R mutation, or a corresponding mutation in any of the amino acid sequences provided herein. In some embodiments, the SpCas9 domain comprises a D1135E, a R1335Q, and a T1336R mutation, or corresponding mutations in any of the amino acid sequences provided herein. In some embodiments, the SpCas9 domain comprises one or more of a D1135X, a R1335X, and a T1336X mutation, or a corresponding mutation in any of the amino acid sequences provided herein, wherein X is any amino acid. In some embodiments, the SpCas9 domain comprises one or more of a D1135V, a R1335Q, and a T1336R mutation, or a corresponding mutation in any of the amino acid sequences provided herein. In some embodiments, the SpCas9 domain comprises a D1135V, a R1335Q, and a T1336R mutation, or corresponding mutations in any of the amino acid sequences provided herein. In some embodiments, the SpCas9 domain comprises one or more of a D1135X, a G1217X, a R1335X, and a T1336X mutation, or a corresponding mutation in any of the amino acid sequences provided herein, wherein X is any amino acid. In some embodiments, the SpCas9 domain comprises one or more of a D1135V, a G1217R, a R1335Q, and a T1336R mutation, or a corresponding mutation in any of the amino acid sequences provided herein. In some embodiments, the SpCas9 domain comprises a D1135V, a G1217R, a R1335Q, and a T1336R mutation, or corresponding mutations in any of the amino acid sequences provided herein.

[0672] In some embodiments, the Cas9 domains of any of the fusion proteins provided herein comprises an amino acid sequence that is at least 60%, at least 65%, at least 70%, at least 75%, at least 80%, at least 85%, at least 90%, at least 95%, at least 96%, at least 97%, at least 98%, at least 99%, or at least 99.5% identical to a Cas9 polypeptide described herein. In some embodiments, the Cas9 domains of any of the fusion proteins provided herein comprises the amino acid sequence of any Cas9 polypeptide described herein. In some embodiments, the Cas9 domains of any of the fusion proteins provided herein consists of the amino acid sequence of any Cas9 polypeptide described herein.

[0673] In some examples, a PAM recognized by a CRISPR protein-derived domain of a base editor disclosed herein can be provided to a cell on a separate oligonucleotide to an insert (e.g., an AAV insert) encoding the base editor. In such embodiments, providing PAM on a separate oligonucleotide can allow cleavage of a target sequence that otherwise would not be able to be cleaved, because no adjacent PAM is present on the same polynucleotide as the target sequence.

[0674] In an embodiment, S. pyogenes Cas9 (SpCas9) can be used as a CRISPR endonuclease for genome engineering. However, others can be used. In some embodiments, a different endonuclease can be used to target certain genomic targets. In some embodiments, synthetic SpCas9-derived variants with non-NGG PAM sequences can be used. Additionally, other Cas9 orthologues from various species have been identified and these “non-SpCas9s” can bind a variety of PAM sequences that can also be useful for the present disclosure. For example, the relatively large size of SpCas9 (approximately 4 kilobase (kb) coding sequence) can lead to plasmids carrying the SpCas9 cDNA that cannot be efficiently expressed in a cell. Conversely, the coding sequence for Staphylococcus aureus Cas9 (SaCas9) is approximately 1 kilobase shorter than SpCas9, possibly allowing it to be efficiently expressed in a cell. Similar to SpCas9, the SaCas9 endonuclease is capable of modifying target genes in mammalian cells in vitro and in mice in vivo. In some embodiments, a Cas protein can target a different PAM sequence. In some embodiments, a target gene can be adjacent to a Cas9 PAM, 5′-NGG, for example. In other embodiments, other Cas9 orthologs can have different PAM requirements. For example, other PAMs such as those of S. thermophilus (5′-NNAGAA for CRISPR1 and 5′-NGGNG for CRISPR3) and Neisseria meningiditis (5′-NNNNGATT) can also be found adjacent to a target gene.

[0675] In some embodiments, for a S. pyogenes system, a target gene sequence can precede (i.e., be 5′ to) a 5′-NGG PAM, and a 20-nt guide RNA sequence can base pair with an opposite strand to mediate a Cas9 cleavage adjacent to a PAM. In some embodiments, an adjacent cut can be or can be about 3 base pairs upstream of a PAM. In some embodiments, an adjacent cut can be or can be about 10 base pairs upstream of a PAM. In some embodiments, an adjacent cut can be or can be about 0-20 base pairs upstream of a PAM. For example, an adjacent cut can be next to, 1, 2, 3, 4, 5, 6, 7, 8, 9, 10, 11, 12, 13, 14, 15, 16, 17, 18, 19, 20, 21, 22, 23, 24, 25, 26, 27, 28, 29, or 30 base pairs upstream of a PAM. An adjacent cut can also be downstream of a PAM by 1 to 30 base pairs. The sequences of exemplary SpCas9 proteins capable of binding a PAM sequence follow:

[0676] The amino acid sequence of an exemplary PAM-binding SpCas9 is as follows:

[sequence omitted]

[0677] The amino acid sequence of an exemplary PAM-binding SpCas9n is as follows:

MDKKYSIGLAIGTNSVGWAVITDEYKVPSKKFKVLGNTDRHSIKKNLIGA
LLFDSGETAEATRLKRTARRRYTRRKNRICYLQEIFSNEMAKVDDSFFHR
LEESFLVEEDKKHERHPIFGNIVDEVAYHEKYPTIYHLRKKLVDSTDKAD
LRLIYLALAHMIKFRGHFLIEGDLNPDNSDVDKLFIQLVQTYNQLFEENP
INASGVDAKAILSARLSKSRRLENLIAQLPGEKKNGLFGNLIALSLGLTP
NFKSNFDLAEDAKLQLSKDTYDDDLDNLLAQIGDQYADLFLAAKNLSDAI
LLSDILRVNTEITKAPLSASMIKRYDEHHQDLTLLKALVRQQLPEKYKEI
FFDQSKNGYAGYIDGGASQEEFYKFIKPILEKMDGTEELLVKLNREDLLR
KQRTFDNGSIPHQIHLGELHAILRRQEDFYPFLKDNREKIEKILTFRIPY
YVGPLARGNSRFAWMTRKSEETITPWNFEEVVDKGASAQSFIERMTNFDK
NLPNEKVLPKHSLLYEYFTVYNELTKVKYVTEGMRKPAFLSGEQKKAIVD
LLFKTNRKVTVKQLKEDYFKKIECFDSVEISGVEDRFNASLGTYHDLLKI
IKDKDFLDNEENEDILEDIVLTLTLFEDREMIEERLKTYAHLFDDKVMKQ
LKRRRYTGWGRLSRKLINGIRDKQSGKTILDFLKSDGFANRNFMQLIHDD
SLTFKEDIQKAQVSGQGDSLHEHIANLAGSPAIKKGILQTVKVVDELVKV
MGRHKPENIVIEMARENQTTQKGQKNSRERMKRIEEGIKELGSQILKEHP
VENTQLQNEKLYLYYLQNGRDMYVDQELDINRLSDYDVDHIVPQSFLKDD
SIDNKVLTRSDKNRGKSDNVPSEEVVKKMKNYWRQLLNAKLITQRKFDNL
TKAERGGLSELDKAGFIKRQLVETRQITKHVAQILDSRMNTKYDENDKLI
REVKVITLKSKLVSDFRKDFQFYKVREINNYHHAHDAYLNAVVGTALIKK
YPKLESEFVYGDYKVYDVRKMIAKSEQEIGKATAKYFFYSNIMNFFKTEI
TLANGEIRKRPLIETNGETGEIVWDKGRDFATVRKVLSMPQVNIVKKTEV
QTGGFSKESILPKRNSDKLIARKKDWDPKKYGGFDSPTVAYSVLVVAKVE
KGKSKKLKSVKELLGITIMERSSFEKNPIDFLEAKGYKEVKKDLIIKLPK
YSLFELENGRKRMLASAGELQKGNELALPSKYVNFLYLASHYEKLKGSPE
DNEQKQLFVEQHKHYLDEIIEQISEFSKRVILADANLDKVLSAYNKHRDK
PIREQAENIIHLFTLTNLGAPAAFKYFDTTIDRKRYTSTKEVLDATLIHQ
SITGLYETRIDLSQLGGD.

[0678] The amino acid sequence of an exemplary PAM-binding SpEQR Cas9 is as follows:

MDKKYSIGLAIGTNSVGWAVITDEYKVPSKKFKVLGNTDRHSIKKNLIGA
LLFDSGETAEATRLKRTARRRYTRRKNRICYLQEIFSNEMAKVDDSFFHR
LEESFVEEDKKHERHPIFGNIVDEVAYHEKYPTIYHLRKKLVDSTDKADL
RLIYLALAHMIKFRGHFLIEGDLNPDNSDVDKLFIQLVQTYNQLFEENPI
NASGVDAKAILSARLSKSRRLENLIAQLPGEKKNGLFGNLIALSLGLTPN
FKSNFDLAEDAKLQLSKDTYDDDLDNLLAQIGDQYADLFLAAKNLSDAIL
LSDILRVNTEITKAPLSASMIKRYDEHHQDLTLLKALVRQQLPEKYKEIF
FDQSKNGYAGYIDGGASQEEFYKFIKPILEKMDGTEELLVKLNREDLLRK
QRTFDNGSIPHQIHLGELHAILRRQEDFYPFLKDNREKIEKILTFRIPYY
VGPLARGNSRFAWMTRKSEETITPWNFEEVVDKGASAQSFIERMTNFDKN
LPNEKVLPKHSLLYEYFTVYNELTKVKYVTEGMRKPAFLSGEQKKAIVDL
LFKTNRKVTVKQLKEDYFKKIECFDSVEISGVEDRFNASLGTYHDLLKII
KDKDFLDNEENEDILEDIVLTLTLFEDREMIEERLKTYAHLFDDKVMKQL
KRRRYTGWGRLSRKLINGIRDKQSGKTILDFLKSDGFANRNFMQLIHDDS
LTFKEDIQKAQVSGQGDSLHEHIANLAGSPAIKKGILQTVKVVDELVKVM
GRHKPENIVIEMARENQTTQKGQKNSRERMKRIEEGIKELGSQILKEHPV
ENTQLQNEKLYLYYLQNGRDMYVDQELDINRLSDYDVDHIVPQSFLKDDS
IDNKVLTRSDKNRGKSDNVPSEEVVKKMKNYWRQLLNAKLITQRKFDNLT
KAERGGLSELDKAGFIKRQLVETRQITKHVAQILDSRMNTKYDENDKLIR
EVKVITLKSKLVSDFRKDFQFYKVREINNYHHAHDAYLNAVVGTALIKKY
PKLESEFVYGDYKVYDVRKMIAKSEQEIGKATAKYFFYSNIMNFFKTEIT
LANGEIRKRPLIETNGETGEIVWDKGRDFATVRKVLSMPQVNIVKKTEVQ
TGGFSKESILPKRNSDKLIARKKDWDPKKYGGFESPTVAYSVLVVAKVEK
GKSKKLKSVKELLGITIMERSSFEKNPIDFLEAKGYKEVKKDLIIKLPKY
SLFELENGRKRMLASAGELQKGNELALPSKYVNFLYLASHYEKLKGSPED
NEQKQLFVEQHKHYLDEIIEQISEFSKRVILADANLDKVLSAYNKHRDKP
IREQAENIIHLFTLTNLGAPAAFKYFDTTIDRKQYRSTKEVLDATLIHQS
ITGLYETRIDLSQLGGD.

[0679] In this sequence, residues E1135, Q1335 and R1337, which can be mutated from D1135, R1335, and T1337 to yield a SpEQR Cas9, are underlined and in bold.

[0680] The amino acid sequence of an exemplary PAM-binding SpVQR Cas9 is as follows:

MDKKYSIGLAIGTNSVGWAVITDEYKVPSKKFKVLGNTDRHSIKKNLIGA
LLFDSGETAEATRLKRTARRRYTRRKNRICYLQEIFSNEMAKVDDSFFHR
LEESFLVEEDKKHERHPIFGNIVDEVAYHEKYPTIYHLRKKLVDSTDKAD
LRLIYLALAHMIKFRGHFLIEGDLNPDNSDVDKLFIQLVQTYNQLFEENP
INASGVDAKAILSARLSKSRRLENLIAQLPGEKKNGLFGNLIALSLGLTP
NFKSNFDLAEDAKLQLSKDTYDDDLDNLLAQIGDQYADLFLAAKNLSDAI
LLSDILRVNTEITKAPLSASMIKRYDEHHQDLTLLKALVRQQLPEKYKEI
FFDQSKNGYAGYIDGGASQEEFYKFIKPILEKMDGTEELLVKLNREDLLR
KQRTFDNGSIPHQIHLGELHAILRRQEDFYPFLKDNREKIEKILTFRIPY
YVGPLARGNSRFAWMTRKSEETITPWNFEEVVDKGASAQSFIERMTNFDK
NLPNEKVLPKHSLLYEYFTVYNELTKVKYVTEGMRKPAFLSGEQKKAIVD
LLFKTNRKVTVKQLKEDYFKKIECFDSVEISGVEDRFNASLGTYHDLLKI
IKDKDFLDNEENEDILEDIVLTLTLFEDREMIEERLKTYAHLFDDKVMKQ
LKRRRYTGWGRLSRKLINGIRDKQSGKTILDFLKSDGFANRNFMQLIHDD
SLTFKEDIQKAQVSGQGDSLHEHIANLAGSPAIKKGILQTVKVVDELVKV
MGRHKPENIVIEMARENQTTQKGQKNSRERMKRIEEGIKELGSQILKEHP
VENTQLQNEKLYLYYLQNGRDMYVDQELDINRLSDYDVDHIVPQSFLKDD
SIDNKVLTRSDKNRGKSDNVPSEEVVKKMKNYWRQLLNAKLITQRKFDNL
TKAERGGLSELDKAGFIKRQLVETRQITKHVAQILDSRMNTKYDENDKLI
REVKVITLKSKLVSDFRKDFQFYKVREINNYHHAHDAYLNAVVGTALIKK
YPKLESEFVYGDYKVYDVRKMIAKSEQEIGKATAKYFFYSNIMNFFKTEI
TLANGEIRKRPLIETNGETGEIVWDKGRDFATVRKVLSMPQVNIVKKTEV
QTGGFSKESILPKRNSDKLIARKKDWDPKKYGGFVSPTVAYSVLVVAKVE
KGKSKKLKSVKELLGITIMERSSFEKNPIDFLEAKGYKEVKKDLIIKLPK
YSLFELENGRKRMLASAGELQKGNELALPSKYVNFLYLASHYEKLKGSPE
DNEQKQLFVEQHKHYLDEIIEQISEFSKRVILADANLDKVLSAYNKHRDK
PIREQAENIIHLFTLTNLGAPAAFKYFDTTIDRKQYRSTKEVLDATLIHQ
SITGLYETRIDLSQLGGD.

[0681] In this sequence, residues V1135, Q1335, and R1336, which can be mutated from D1135, R1335, and T1336 to yield a SpVQR Cas9, are underlined and in bold.

[0682] The amino acid sequence of an exemplary PAM-binding SpVRER Cas9 is as follows:

MDKKYSIGLAIGTNSVGWAVITDEYKVPSKKFKVLGNTDRHSIKKNLIGAL
LFDSGETAEATRLKRTARRRYTRRKNRICYLQEIFSNEMAKVDDSFFHRLE
ESFLVEEDKKHERHPIFGNIVDEVAYHEKYPTIYHLRKKLVDSTDKADLRL
IYLALAHMIKFRGHFLIEGDLNPDNSDVDKLFIQLVQTYNQLFEENPINAS
GVDAKAILSARLSKSRRLENLIAQLPGEKKNGLFGNLIALSLGLTPNFKSN
FDLAEDAKLQLSKDTYDDDLDNLLAQIGDQYADLFLAAKNLSDAILLSDIL
RVNTEITKAPLSASMIKRYDEHHQDLTLLKALVRQQLPEKYKEIFFDQSKN
GYAGYIDGGASQEEFYKFIKPILEKMDGTEELLVKLNREDLLRKQRTFDNG
SIPHQIHLGELHAILRRQEDFYPFLKDNREKIEKILTFRIPYYVGPLARGN
SRFAWMTRKSEETITPWNFEEVVDKGASAQSFIERMTNFDKNLPNEKVLPK
HSLLYEYFTVYNELTKVKYVTEGMRKPAFLSGEQKKAIVDLLFKTNRKVTV
KQLKEDYFKKIECFDSVEISGVEDRFNASLGTYHDLLKIIKDKDFLDNEEN
EDILEDIVLTLTLFEDREMIEERLKTYAHLFDDKVMKQLKRRRYTGWGRLS
RKLINGIRDKQSGKTILDFLKSDGFANRNFMQLIHDDSLTFKEDIQKAQVS
GQGDSLHEHIANLAGSPAIKKGILQTVKVVDELVKVMGRHKPENIVIEMAR
ENQTTQKGQKNSRERMKRIEEGIKELGSQILKEHPVENTQLQNEKLYLYYL
QNGRDMYVDQELDINRLSDYDVDHIVPQSFLKDDSIDNKVLTRSDKNRGKS
DNVPSEEVVKKMKNYWRQLLNAKLITQRKFDNLTKAERGGLSELDKAGFIK
RQLVETRQITKHVAQILDSRMNTKYDENDKLIREVKVITLKSKLVSDFRKD
FQFYKVREINNYHHAHDAYLNAVVGTALIKKYPKLESEFVYGDYKVYDVRK
MIAKSEQEIGKATAKYFFYSNIMNFFKTEITLANGEIRKRPLIETNGETGE
IVWDKGRDFATVRKVLSMPQVNIVKKTEVQTGGFSKESILPKRNSDKLIAR
KKDWDPKKYGGFVSPTVAYSVLVVAKVEKGKSKKLKSVKELLGITIMERSS
FEKNPIDFLEAKGYKEVKKDLIIKLPKYSLFELENGRKRMLASARELQKGN
ELALPSKYVNFLYLASHYEKLKGSPEDNEQKQLFVEQHKHYLDEIIEQISE
FSKRVILADANLDKVLSAYNKHRDKPIREQAENIIHLFTLTNLGAPAAFKY
FDTTIDRKEYRSTKEVLDATLIHQSITGLYETRIDLSQLGGD.

[0683] In some embodiments, the Cas9 domain is a recombinant Cas9 domain. In some embodiments, the recombinant Cas9 domain is a SpyMacCas9 domain. In some embodiments, the SpyMacCas9 domain is a nuclease active SpyMacCas9, a nuclease inactive SpyMacCas9 (SpyMacCas9d), or a SpyMacCas9 nickase (SpyMacCas9n). In some embodiments, the SaCas9 domain, the SaCas9d domain, or the SaCas9n domain can bind to a nucleic acid sequence having a non-canonical PAM. In some embodiments, the SpyMacCas9 domain, the SpCas9d domain, or the SpCas9n domain can bind to a nucleic acid sequence having a NAA PAM sequence.

### Exemplary SpyMacCas9

MDKKYSIGLDIGTNSVGWAVITDDYKVPSKKFKVLGNTDRHSIKKNLIGA
LLFGSGETAEATRLKRTARRRYTRRKNRICYLQEIFSNEMAKVDDSFFHR
LEESFLVEEDKKHERHPIFGNIVDEVAYHEKYPTIYHLRKKLADSTDKAD
LRLIYLALAHMIKFRGHFLIEGDLNPDNSDVDKLFIQLVQIYNQLFEENP
INASRVDAKAILSARLSKSRRLENLIAQLPGEKRNGLFGNLIALSLGLTP
NFKSNFDLAEDAKLQLSKDTYDDDLDNLLAQIGDQYADLFLAAKNLSDAI
LLSDILRVNSEITKAPLSASMIKRYDEHHQDLTLLKALVRQQLPEKYKEI
FFDQSKNGYAGYIDGGASQEEFYKFIKPILEKMDGTEELLVKLNREDLLR
KQRTFDNGSIPHQIHLGELHAILRRQEDFYPFLKDNREKIEKILTFRIPY
YVGPLARGNSRFAWMTRKSEETITPWNFEEVVDKGASAQSFIERMTNFDK
NLPNEKVLPKHSLLYEYFTVYNELTKVKYVTEGMRKPAFLSGEQKKAIVD
LLFKTNRKVTVKQLKEDYFKKIECFDSVEISGVEDRFNASLGAYHDLLKI
IKDKDFLDNEENEDILEDIVLTLTLFEDRGMIEERLKTYAHLFDDKVMKQ
LKRRRYTGWGRLSRKLINGIRDKQSGKTILDFLKSDGFANRNFMQLIHDD
SLTFKEDIQKAQVSGQGHSLHEQIANLAGSPAIKKGILQTVKIVDELVKV
MGHKPENIVIEMARENQTTQKGQKNSRERMKRIEEGIKELGSQILKEHPV
ENTQLQNEKLYLYYLQNGRDMYVDQELDINRLSDYDVDHIVPQSFIKDDS
IDNKVLTRSDKNRGKSDNVPSEEVVKKMKNYWRQLLNAKLITQRKFDNLT
KAERGGLSELDKAGFIKRQLVETRQITKHVAQILDSRMNTKYDENDKLIR
EVKVITLKSKLVSDFRKDFQFYKVREINNYHHAHDAYLNAVVGTALIKKY
PKLESEFVYGDYKVYDVRKMIAKSEQEIGKATAKYFFYSNIMNFFKTEIT
LANGEIRKRPLIETNGETGEIVWDKGRDFATVRKVLSMPQVNIVKKTEIQ
TVGQNGGLFDDNPKSPLEVTPSKLVPLKKELNPKKYGGYQKPTTAYPVLL
ITDTKQLIPISVMNKKQFEQNPVKFLRDRGYQQVGKNDFIKLPKYTLVDI
GDGIKRLWASSKEIHKGNQLVVSKKSQILLYHAHHLDSDLSNDYLQNHNQ
QFDVLFNEIISFSKKCKLGKEHIQKIENVYSNKKNSASIEELAESFIKLL
GFTQLGATSPFNFLGVKLNQKQYKGKKDYILPCTEGTLIRQSITGLYETR
VDLSKIGED.

[0685] In some cases, a variant Cas9 protein harbors, H840A, P475A, W476A, N477A, D1125A, W1126A, and D1218A mutations such that the polypeptide has a reduced ability to cleave a target DNA or RNA. Such a Cas9 protein has a reduced ability to cleave a target DNA (e.g., a single stranded target DNA) but retains the ability to bind a target DNA (e.g., a single stranded target DNA). As another non-limiting example, in some cases, the variant Cas9 protein harbors D10A, H840A, P475A, W476A, N477A, D1125A, W1126A, and D1218A mutations such that the polypeptide has a reduced ability to cleave a target DNA. Such a Cas9 protein has a reduced ability to cleave a target DNA (e.g., a single stranded target DNA) but retains the ability to bind a target DNA (e.g., a single stranded target DNA). In some cases, when a variant Cas9 protein harbors W476A and W 1126A mutations or when the variant Cas9 protein harbors P475A, W476A, N477A, D1125A, W1126A, and D1218A mutations, the variant Cas9 protein does not bind efficiently to a PAM sequence. Thus, in some such cases, when such a variant Cas9 protein is used in a method of binding, the method does not require a PAM sequence. In other words, in some cases, when such a variant Cas9 protein is used in a method of binding, the method can include a guide RNA, but the method can be performed in the absence of a PAM sequence (and the specificity of binding is therefore provided by the targeting segment of the guide RNA). Other residues can be mutated to achieve the above effects (i.e., inactivate one or the other nuclease portions). As non-limiting examples, residues D10, G12, G17, E762, H840, N854, N863, H982, H983, A984, D986, and/or A987 can be altered (i.e., substituted). Also, mutations other than alanine substitutions are suitable. In some embodiments, a CRISPR protein-derived domain of a base editor can comprise all or a portion of a Cas9 protein with a canonical PAM sequence (NGG). In other embodiments, a Cas9-derived domain of a base editor can employ a non-canonical PAM sequence. Such sequences have been described in the art and would be apparent to the skilled artisan. For example, Cas9 domains that bind non-canonical PAM sequences have been described in Kleinstiver, B. P., et al., “Engineered CRISPR-Cas9 nucleases with altered PAM specificities” Nature 523, 481-485 (2015); and Kleinstiver, B. P., et al., “Broadening the targeting range of Staphylococcus aureus CRISPR-Cas9 by modifying PAM recognition” Nature Biotechnology 33, 1293-1298 (2015); the entire contents of each are hereby incorporated by reference.

[0686] In some embodiments, the Cas9 domain may be replaced with a guide nucleotide sequence-programmable DNA-binding protein domain that has no requirements for a PAM sequence.

[0687] In some embodiments, the nucleic acid programmable DNA binding protein (napDNAbp) is a single effector of a microbial CRISPR-Cas system. Single effectors of microbial CRISPR-Cas systems include, without limitation, Cas9, Cpf1, Cas12b/C2c1, and Cas12c/C2c3. Typically, microbial CRISPR-Cas systems are divided into Class 1 and Class 2 systems. Class 1 systems have multisubunit effector complexes, while Class 2 systems have a single protein effector. For example, Cas9 and Cpf1 are Class 2 effectors. In addition to Cas9 and Cpf1, three distinct Class 2 CRISPR-Cas systems (Cas12b/C2c1 and Cas12c/C2c3) have been described by Shmakov et al., “Discovery and Functional Characterization of Diverse Class 2 CRISPR Cas Systems”, Mol. Cell, 2015 Nov. 5; 60(3): 385-397, the entire contents of which is hereby incorporated by reference. Effectors of two of the systems, Cas12b/C2c1 and Cas12c/C2c3, contain RuvC-like endonuclease domains related to Cpf1. A third system, contains an effector with two predicated HEPN RNase domains. Production of mature CRISPR RNA is tracrRNA-independent, unlike production of CRISPR RNA by Cas12b/C2c1. Cas12b/C2c1 depends on both CRISPR RNA and tracrRNA for DNA cleavage.

[0688] The crystal structure of Alicyclobaccillus acidoterrastris Cas12b/C2c1 (AacC2c1) has been reported in complex with a chimeric single-molecule guide RNA (sgRNA). See e.g., Liu et al., “C2c1-sgRNA Complex Structure Reveals RNA-Guided DNA Cleavage Mechanism”, Mol. Cell, 2017 Jan. 19; 65(2):310-322, the entire contents of which are hereby incorporated by reference. The crystal structure has also been reported in Alicyclobacillus acidoterrestris Cas12b/C2c1 bound to target DNAs as ternary complexes. See e.g., Yang et al., “PAM-dependent Target DNA Recognition and Cleavage by C2C1 CRISPR-Cas endonuclease”, Cell, 2016 Dec. 15; 167(7):1814-1828, the entire contents of which are hereby incorporated by reference. Catalytically competent conformations of AacC2c1, both with target and non-target DNA strands, have been captured independently positioned within a single RuvC catalytic pocket, with Cas12b/C2c1-mediated cleavage resulting in a staggered seven-nucleotide break of target DNA. Structural comparisons between Cas12b/C2c1 ternary complexes and previously identified Cas9 and Cpf1 counterparts demonstrate the diversity of mechanisms used by CRISPR-Cas9 systems.

[0689] In some embodiments, the nucleic acid programmable DNA binding protein (napDNAbp) of any of the fusion proteins provided herein may be a Cas12b/C2c1, or a Cas12c/C2c3 protein. In some embodiments, the napDNAbp is a Cas12b/C2c1 protein. In some embodiments, the napDNAbp is a Cas12c/C2c3 protein. In some embodiments, the napDNAbp comprises an amino acid sequence that is at least 85%, at least 90%, at least 91%, at least 92%, at least 93%, at least 94%, at least 95%, at least 96%, at least 97%, at least 98%, at least 99%, or at ease 99.5% identical to a naturally-occurring Cas12b/C2c1 or Cas12c/C2c3 protein. In some embodiments, the napDNAbp is a naturally-occurring Cas12b/C2c1 or Cas12c/C2c3 protein. In some embodiments, the napDNAbp comprises an amino acid sequence that is at least 85%, at least 90%, at least 91%, at least 92%, at least 93%, at least 94%, at least 95%, at least 96%, at least 97%, at least 98%, at least 99%, or at ease 99.5% identical to any one of the napDNAbp sequences provided herein. It should be appreciated that Cas12b/C2c1 or Cas12c/C2c3 from other bacterial species may also be used in accordance with the present disclosure. CRISPR-Cas12b is described, for example, by Teng et al., Cell Discovery (2018) 4:63, which is incorporated therein by reference in its entirety.

[0690] Cas12b/C2c1 (uniprot.org/uniprot/TOD7A2#2)

[0691] spTOD7A2|C2C1_ALIAG CRISPR-associated endo-nuclease C2c1 OS=Alicyclobacillus acido-terrestris (strain ATCC 49025/DSM 3922/CIP 106132/NCIMB 13137/GD3B) GN=c2c1 PE=1 SV=1

MAVKSIKVKLRLDDMPEIRAGLWKLHKEVNAGVRYYTEWLSLLRQENLYR
RSPNGDGEQECDKTAEECKAELLERLRARQVENGHRGPAGSDDELLQLAR
QLYELLVPQAIGAKGDAQQIARKFLSPLADKDAVGGLGIAKAGNKPRWVR
MREAGEPGWEEEKEKAETRKSADRTADVLRALADFGLKPLMRVYTDSEMS
SVEWKPLRKGQAVRTWDRDMFQQAIERMMSWESWNQRVGQEYAKLVEQKN
RFEQKNFVGQEHLVHLVNQLQQDMKEASPGLESKEQTAHYVTGRALRGSD
KVFEKWGKLAPDAPFDLYDAEIKNVQRRNTRRFGSHDLFAKLAEPEYQAL
WREDASFLTRYAVYNSILRKLNHAKMFATFTLPDATAHPIWTRFDKLGGN
LHQYTFLFNEFGERRHAIRFHKLLKVENGVAREVDDVTVPISMSEQLDNL
LPRDPNEPIALYFRDYGAEQHFTGEFGGAKIQCRRDQLAHMHRRRGARDV
YLNVSVRVQSQSEARGERRPPYAAVFRLVGDNHRAFVHFDKLSDYLAEHP
DDGKLGSEGLLSGLRVMSVDLGLRTSASISVFRVARKDELKPNSKGRVPF
FFPIKGNDNLVAVHERSQLLKLPGETESKDLRAIREERQRTLRQLRTQLA
YLRLLVRCGSEDVGRRERSWAKLIEQPVDAANHMTPDWREAFENELQKLK
SLHGICSDKEWMDAVYESVRRVWRHMGKQVRDWRKDVRSGERPKIRGYAK
DVVGGNSIEQIEYLERQYKFLKSWSFFGKVSGQVIRAEKGSRFAITLREH
IDHAKEDRLKKLADRIIMEALGYVYALDERGKGKWVAKYPPCQLILLEEL
SEYQFNNDRPPSENNQLMQWSHRGVFQELINQAQVHDLLVGTMYAAFSSR
FDARTGAPGIRCRRVPARCTQEHNPEPFPWWLNKFVVEHTLDACPLRADD
LIPTGEGEIFVSPFSAEEGDFHQIHADLNAAQNLQQRLWSDFDISQIRLR
CDWGEVDGELVLIPRLTGKRTADSYSNKVFYTNTGVTYYERERGKKRRKV
FAQEKLSEEEAELLVEADEAREKSVVLMRDPSGIINRGNWTRQKEFWSMV
NQRIEGYLVKQIRSRVPLQDSACENTGDI

[0692] AacCas12b (Alicyclobacillus acidiphilus)—WP_067623834

MAVKSMKVKLRLDNMPEIRAGLWKLHTEVNAGVRYYTEWLSLLRQENLYR
RSPNGDGEQECYKTAEECKAELLERLRARQVENGHCGPAGSDDELLQLAR
QLYELLVPQAIGAKGDAQQIARKFLSPLADKDAVGGLGIAKAGNKPRWVR
MREAGEPGWEEEKAKAEARKSTDRTADVLRALADFGLKPLMRVYTDSDMS
SVQWKPLRKGQAVRTWDRDMFQQAIERMMSWESWNQRVGEAYAKLVEQKS
RFEQKNFVGQEHLVQLVNQLQQDMKEASHGLESKEQTAHYLTGRALRGSD
KVFEKWEKLDPDAPFDLYDTEIKNVQRRNTRRFGSHDLFAKLAEPKYQAL
WREDASFLTRYAVYNSIVRKLNHAKMFATFTLPDATAHPIWTRFDKLGGN
LHQYTFLFNEFGEGRHAIRFQKLLTVEDGVAKEVDDVTVPISMSAQLDDL
LPRDPHELVALYFQDYGAEQHLAGEFGGAKIQYRRDQLNHLHARRGARDV
YLNLSVRVQSQSEARGERRPPYAAVFRLVGDNHRAFVHFDKLSDYLAEHP
DDGKLGSEGLLSGLRVMSVDLGLRTSASISVFRVARKDELKPNSEGRVPF
CFPIEGNENLVAVHERSQLLKLPGETESKDLRAIREERQRTLRQLRTQLA
YLRLLVRCGSEDVGRRERSWAKLIEQPMDANQMTPDWREAFEDELQKLKS
LYGICGDREWTEAVYESVRRVWRHMGKQVRDWRKDVRSGERPKIRGYQKD
VVGGNSIEQIEYLERQYKFLKSWSFFGKVSGQVIRAEKGSRFAITLREHI
DHAKEDRLKKLADRIIMEALGYVYALDDERGKGKWVAKYPPCQLILLEEL
SEYQFNNDRPPSENNQLMQWSHRGVFQELLNQAQVHDLLVGTMYAAFSSR
FDARTGAPGIRCRRVPARCAREQNPEPFPWWLNKFVAEHKLDGCPLRADD
LIPTGEGEFFVSPFSAEEGDFHQIHADLNAAQNLQRRLWSDFDISQIRLR
CDWGEVDGEPVLIPRTTGKRTADSYGNKVFYTKTGVTYYERERGKKRRKV
FAQEELSEEEAELLVEADEAREKSVVLMRDPSGIINRGDWTRQKEFWSMV
NQRIEGYLVKQIRSRVRLQESACENTGDI

[0693] BvCas12b (Bacillus sp. V3-13) NCBI Reference Sequence: WP_101661451.1

MAIRSIKLKMKTNSGTDSIYLRKALWRTHQLINEGIAYYMNLLTLYRQEA
IGDKTKEAYQAELINIIRNQQRNNGSSEEHGSDQEILALLRQLYELIIPS
SIGESGDANQLGNKFLYPLVDPNSQSGKGTSNAGRKPRWKRLKEEGNPDW
ELEKKKDEERKAKDPTVKIFDNLNKYGLLPLFPLFTNIQKDIEWLPLGKR
QSVRKWDKDMFIQAIERLLSWESWNRRVADEYKQLKEKTESYYKEHLTGG
EEWIEKIRKFEKERNMELEKNAFAPNDGYFITSRQIRGWDRVYEKWSKLP
ESASPEELWKVVAEQQNKMSEGFGDPKVFSFLANRENRDIWRGHSERIYH
IAAYNGLQKKLSRTKEQATFTLPDAIEHPLWIRYESPGGTNLNLFKLEEK
QKKNYYVTLSKIIWPSEEKWIEKENIEIPLAPSIQFNRQIKLKQHVKGKQ
EISFSDYSSRISLDGVLGGSRIQFNRKYIKNHKELLGEGDIGPVFFNLVV
DVAPLQETRNGRLQSPIGKALKVISSDFSKVIDYKPKELMDWMNTGSASN
SFGVASLLEGMRVMSIDMGQRTSASVSIFEVVKELPKDQEQKLFYSINDT
ELFAIHKRSFLLNLPGEVVTKNNKQQRQERRKKRQFVRSQIRMLANVLRL
ETKKTPDERKKAIHKLMEIVQSYDSWTASQKEVWEKELNLLTNMAAFNDE
IWKESLVELHHRIEPYVGQIVSKWRKGLSEGRKNLAGISMWNIDELEDTR
RLLISWSKRSRTPGEANRIETDEPFGSSLLQHIQNVKDDRLKQMANLIIM
TALGFKYDKEEKDRYKRWKETYPACQIILFENLNRYLFNLDRSRRENSRL
MKWAHRSIPRTVSMQGEMFGLQVGDVRSEYSSRFHAKTGAPGIRCHALTE
EDLKAGSNTLKRLIEDGFINESELAYLKKGDIIPSQGGELFVTLSKRYKK
DSDNNELTVIHADINAAQNLQKRFWQQNSEVYRVPCQLARMGEDKLYIPK
SQTETIKKYFGKGSFVKNNTEQEVYKWEKSEKMKIKTDTTFDLQDLDGFE
DISKTIELAQEQQKKYLTMFRDPSGYFFNNETWRPQKEYWSIVNNIIKSC
LKKKILSNKVEL

[0694] BhCas12b (Bacillus hisashii) NCBI Reference Sequence: WP_095142515

MAPKKKRKVGIHGVPAAATRSFILKIEPNEEVKKGLWKTHEVLNHGIAYY
MNILKLIRQEAIYEHHEQDPKNPKKVSKAEIQAELWDFVLKMQKCNSFTH
EVDKDEVFNILRELYEELVPSSVEKKGEANQLSNKFLYPLVDPNSQSGKG
TASSGRKPRWYNLKIAGDPSWEEEKKKWEEDKKKDPLAKILGKLAEYGLI
PLFIPYTDSNEPIVKEIKWMEKSRNQSVRRLDKDMFIQALERFLSWESWN
LKVKEEYEKVEKEYKTLEERIKEDIQALKALEQYEKERQEQLLRDTLNTN
EYRLSKRGLRGWREIIQKWLKMDENEPSEKYLEVFKDYQRKHPREAGDYS
VYEFLSKKENHFIWRNHPEYPYLYATFCEIDKKKKDAKQQATFTLADPIN
HPLWVRFEERSGSNLNKYRILTEQLHTEKLKKKLTVQLDRLIYPTESGGW
EEKGKVDIVLLPSRQFYNQIFLDIEEKGKHAFTYKDESIKFPLKGTLGGA
RVQFDRDHLRRYPHKVESGNVGRIYFNMTVNIEPTESPVSKSLKIHRDDF
PKVVNFKPKELTEWIKDSKGKKLKSGIESLEIGLRVMSIDLGQRQAAAAS
IFEVVDQKPDIEGKLFFPIKGTELYAVHRASFNIKLPGETLVKSREVLRK
AREDNLKLMNQKLNFLRNVLHFQQFEDITEREKRVTKWISRQENSDVPLV
YQDELIQIRELMYKPYKDWVAFLKQLHKRLEVEIGKEVKHWRKSLSDGRK
GLYGISLKNIDEIDRTRKFLLRWSLRPTEPGEVRRLEPGQRFAIDQLNHL
NALKEDRLKKMANTIIMHALGYCYDVRKKKWQAKNPACQIILFEDLSNYN
PYEERSRFENSKLMKWSRREIPRQVALQGEIYGLQVGEVGAQFSSRFHAK
TGSPGIRCSVVTKEKLQDNRFFKNLQREGRLTLDKIAVLKEGDLYPDKGG
EKFISLSKDRKCVTTHADINAAQNLQKRFWTRTHGFYKVYCKAYQVDGQT
VYIPESKDQKQKIIEEFGEGYFILKDGVYEWVNAGKLKIKKGSSKQSSSE
LVDSDILKDSFDLASELKGEKLMLYRDPSGNVFPSDKWMAAGVFFGKLER
ILISKLTNQYSISTIEDDSSKQSMKRPAATKKAGQAKKKK

including the variant termed BvCas12b V4 (S893R/K846R/E837G changes rel. to wt above)

[0695] BhCas12b (V4) is expressed as follows: 5′ mRNA Cap---5′UTR---bhCas12b---STOP sequence---3′UTR---120polyA tail

5′UTR:
GGGAAATAAGAGAGAAAAGAAGAGTAAGAAGAAATATAAGAGCCACC
3′ UTR (TriLink standard UTR)
GCTGGAGCCTCGGTGGCCATGCTTCTTGCCCCTTGGGCCTCCCCCCAGC
CCCTCCTCCCCTTCCTGCACCCGTACCCCCGTGGTCTTTGAATAAAGTC
TGA

[0696] Nucleic acid sequence of bhCas12b (V4)

ATGGCCCCAAAGAAGAAGCGGAAGGTCGGTATCCACGGAGTCCCAGCAGC
CGCCACCAGATCCTTCATCCTGAAGATCGAGCCCAACGAGGAAGTGAAGA
AAGGCCTCTGGAAAACCCACGAGGTGCTGAACCACGGAATCGCCTACTAC
ATGAATATCCTGAAGCTGATCCGGCAAGAGGCCATCTACGAGCACCACGA
GCAGGACCCCAAGAATCCCAAGAAGGTGTCCAAGGCCGAGATCCAGGCCG
AGCTGTGGGATTTCGTGCTGAAGATGCAGAAGTGCAACAGCTTCACACAC
GAGGTGGACAAGGACGAGGTGTTCAACATCCTGAGAGAGCTGTACGAGGA
ACTGGTGCCCAGCAGCGTGGAAAAGAAGGGCGAAGCCAACCAGCTGAGCA
ACAAGTTTCTGTACCCTCTGGTGGACCCCAACAGCCAGTCTGGAAAGGGA
ACAGCCAGCAGCGGCAGAAAGCCCAGATGGTACAACCTGAAGATTGCCGG
CGATCCCTCCTGGGAAGAAGAGAAGAAGAAGTGGGAAGAAGATAAGAAAA
AGGACCCGCTGGCCAAGATCCTGGGCAAGCTGGCTGAGTACGGACTGATC
CCTCTGTTCATCCCCTACACCGACAGCAACGAGCCCATCGTGAAAGAAAT
CAAGTGGATGGAAAAGTCCCGGAACCAGAGCGTGCGGCGGCTGGATAAGG
ACATGTTCATTCAGGCCCTGGAACGGTTCCTGAGCTGGGAGAGCTGGAAC
CTGAAAGTGAAAGAGGAATACGAGAAGGTCGAGAAAGAGTACAAGACCCT
GGAAGAGAGGATCAAAGAGGACATCCAGGCTCTGAAGGCTCTGGAACAGT
ATGAGAAAGAGCGGCAAGAACAGCTGCTGCGGGACACCCTGAACACCAAC
GAGTACCGGCTGAGCAAGAGAGGCCTTAGAGGCTGGCGGGAAATCATCCA
GAAATGGCTGAAAATGGACGAGAACGAGCCCTCCGAGAAGTACCTGGAAG
TGTTCAAGGACTACCAGCGGAAGCACCCTAGAGAGGCCGGCGATTACAGC
GTGTACGAGTTCCTGTCCAAGAAAGAGAACCACTTCATCTGGCGGAATCA
CCCTGAGTACCCCTACCTGTACGCCACCTTCTGCGAGATCGACAAGAAAA
AGAAGGACGCCAAGCAGCAGGCCACCTTCACACTGGCCGATCCTATCAAT
CACCCTCTGTGGGTCCGATTCGAGGAAAGAAGCGGCAGCAACCTGAACAA
GTACAGAATCCTGACCGAGCAGCTGCACACCGAGAAGCTGAAGAAAAAGC
TGACAGTGCAGCTGGACCGGCTGATCTACCCTACAGAATCTGGCGGCTGG
GAAGAGAAGGGCAAAGTGGACATTGTGCTGCTGCCCAGCCGGCAGTTCTA
CAACCAGATCTTCCTGGACATCGAGGAAAAGGGCAAGCACGCCTTCACCT
ACAAGGATGAGAGCATCAAGTTCCCTCTGAAGGGCACACTCGGCGGAGCC
AGAGTGCAGTTCGACAGAGATCACCTGAGAAGATACCCTCACAAGGTGGA
AAGCGGCAACGTGGGCAGAATCTACTTCAACATGACCGTGAACATCGAGC
CTACAGAGTCCCCAGTGTCCAAGTCTCTGAAGATCCACCGGGACGACTTC
CCCAAGGTGGTCAACTTCAAGCCCAAAGAACTGACCGAGTGGATCAAGGA
CAGCAAGGGCAAGAAACTGAAGTCCGGCATCGAGTCCCTGGAAATCGGCC
TGAGAGTGATGAGCATCGACCTGGGACAGAGACAGGCCGCTGCCGCCTCT
ATTTTCGAGGTGGTGGATCAGAAGCCCGACATCGAAGGCAAGCTGTTTTT
CCCAATCAAGGGCACCGAGCTGTATGCCGTGCACAGAGCCAGCTTCAACA
TCAAGCTGCCCGGCGAGACACTGGTCAAGAGCAGAGAAGTGCTGCGGAAG
GCCAGAGAGGACAATCTGAAACTGATGAACCAGAAGCTCAACTTCCTGCG
GAACGTGCTGCACTTCCAGCAGTTCGAGGACATCACCGAGAGAGAGAAGC
GGGTCACCAAGTGGATCAGCAGACAAGAGAACAGCGACGTGCCCCTGGTG
TACCAGGATGAGCTGATCCAGATCCGCGAGCTGATGTACAAGCCTTACAA
GGACTGGGTCGCCTTCCTGAAGCAGCTCCACAAGAGACTGGAAGTCGAGA
TCGGCAAAGAAGTGAAGCACTGGCGGAAGTCCCTGAGCGACGGAAGAAAG
GGCCTGTACGGCATCTCCCTGAAGAACATCGACGAGATCGATCGGACCCG
GAAGTTCCTGCTGAGATGGTCCCTGAGGCCTACCGAACCTGGCGAAGTGC
GTAGACTGGAACCCGGCCAGAGATTCGCCATCGACCAGCTGAATCACCTG
AACGCCCTGAAAGAAGATCGGCTGAAGAAGATGGCCAACACCATCATCAT
GCACGCCCTGGGCTACTGCTACGACGTGCGGAAGAAGAAATGGCAGGCTA
AGAACCCCGCCTGCCAGATCATCCTGTTCGAGGATCTGAGCAACTACAAC
CCCTACGAGGAAAGGTCCCGCTTCGAGAACAGCAAGCTCATGAAGTGGTC
CAGACGCGAGATCCCCAGACAGGTTGCACTGCAGGGCGAGATCTATGGCC
TGCAAGTGGGAGAAGTGGGCGCTCAGTTCAGCAGCAGATTCCACGCCAAG
ACAGGCAGCCCTGGCATCAGATGTAGCGTCGTGACCAAAGAGAAGCTGCA
GGACAATCGGTTCTTCAAGAATCTGCAGAGAGAGGGCAGACTGACCCTGG
ACAAAATCGCCGTGCTGAAAGAGGGCGATCTGTACCCAGACAAAGGCGGC
GAGAAGTTCATCAGCCTGAGCAAGGATCGGAAGTGCGTGACCACACACGC
CGACATCAACGCCGCTCAGAACCTGCAGAAGCGGTTCTGGACAAGAACCC
ACGGCTTCTACAAGGTGTACTGCAAGGCCTACCAGGTGGACGGCCAGACC
GTGTACATCCCTGAGAGCAAGGACCAGAAGCAGAAGATCATCGAAGAGTT
CGGCGAGGGCTACTTCATTCTGAAGGACGGGGTGTACGAATGGGTCAACG
CCGGCAAGCTGAAAATCAAGAAGGGCAGCTCCAAGCAGAGCAGCAGCGAG
CTGGTGGATAGCGACATCCTGAAAGACAGCTTCGACCTGGCCTCCGAGCT
GAAAGGCGAAAAGCTGATGCTGTACAGGGACCCCAGCGGCAATGTGTTCC
CCAGCGACAAATGGATGGCCGCTGGCGTGTTCTTCGGAAAGCTGGAACGC
ATCCTGATCAGCAAGCTGACCAACCAGTACTCCATCAGCACCATCGAGGA
CGACAGCAGCAAGCAGTCTATGAAAAGGCCGGCGGCCACGAAAAAGGCCG
GCCAGGCAAAAAAGAAAAAG

[0697] Fusion proteins comprising a Cas9 domain and a Cytidine Deaminase or Adenosine Deaminase

[0698] Some aspects of the disclosure provide fusion proteins comprising a Cas9 domain or other nucleic acid programmable DNA binding protein and one or more cytidine deaminase or adenosine deaminase domains. It should be appreciated that the Cas9 domain may be any of the Cas9 domains or Cas9 proteins (e.g., dCas9 or nCas9) provided herein. In some embodiments, any of the Cas9 domains or Cas9 proteins (e.g., dCas9 or nCas9) provided herein may be fused with any of the cytidine deaminases provided herein. For example, and without limitation, in some embodiments, the fusion protein comprises the structure:

[0699] NH₂-[cytidine deaminase]-[Cas9 domain]-COOH; or

[0700] NH₂-[Cas9 domain]-[cytidine deaminase]-COOH.

[0701] In some embodiments, the fusion proteins comprising a cytidine deaminase or adenosine deaminase and a napDNAbp (e.g., Cas9 domain) do not include a linker sequence. In some embodiments, a linker is present between the cytidine or adenosine deaminase and the napDNAbp. In some embodiments, the “-” used in the general architecture above indicates the presence of an optional linker. In some embodiments, cytidine or adenosine deaminase and the napDNAbp are fused via any of the linkers provided herein. For example, in some embodiments the cytidine or adenosine deaminase and the napDNAbp are fused via any of the linkers in the section entitled “Linkers”.

### Fusion Proteins Comprising a Nuclear Localization Sequence (NLS)

[0702] In some embodiments, the fusion proteins provided herein further comprise one or more (e.g., 2, 3, 4, 5) nuclear targeting sequences, for example a nuclear localization sequence (NLS). In one embodiment, a bipartite NLS is used. In some embodiments, a NLS comprises an amino acid sequence that facilitates the importation of a protein, that comprises an NLS, into the cell nucleus (e.g., by nuclear transport). In some embodiments, any of the fusion proteins provided herein further comprise a nuclear localization sequence (NLS). In some embodiments, the NLS is fused to the N-terminus of the fusion protein. In some embodiments, the NLS is fused to the C-terminus of the fusion protein. In some embodiments, the NLS is fused to the N-terminus of the Cas9 domain. In some embodiments, the NLS is fused to the C-terminus of the Cas9 domain. In some embodiments, the NLS is fused to the N-terminus of the cytidine or adenosine deaminase. In some embodiments, the NLS is fused to the C-terminus of the cytidine or adenosine deaminase. In some embodiments, the NLS is fused to the fusion protein via one or more linkers. In some embodiments, the NLS is fused to the fusion protein without a linker. In some embodiments, the NLS comprises an amino acid sequence of any one of the NLS sequences provided or referenced herein. Additional nuclear localization sequences are known in the art and would be apparent to the skilled artisan. For example, NLS sequences are described in Plank et al., PCT/EP2000/011690, the contents of which are incorporated herein by reference for their disclosure of exemplary nuclear localization sequences. In some embodiments, an NLS comprises the amino acid sequence KRTADGSEFESPKKKRKV, KRPAATKKAGQAKKKK, KKTELQTTNAENKTKKL, KRGINDRNFWRGENGRKTR, RKSGKIAAIVVKRPRKPKKKRKV, or MDSLLMNRRKFLYQFKNVRWAKGRRETYLC.

[0703] In some embodiments, the general architecture of exemplary Cas9 fusion proteins with a cytidine or adenosine deaminase and a Cas9 domain comprises any one of the following structures, where NLS is a nuclear localization sequence (e.g., any NLS provided herein), NH₂ is the N-terminus of the fusion protein, and COOH is the C-terminus of the fusion protein:

[0704] NH₂—NLS-[cytidine deaminase]-[Cas9 domain]-COOH;

[0705] NH₂—NLS [Cas9 domain]-[cytidine deaminase]-COOH;

[0706] NH₂-[cytidine deaminase]-[Cas9 domain]-NLS—COOH; or

[0707] NH₂-[Cas9 domain]-[cytidine deaminase]-NLS—COOH.

[0708] NH₂—NLS-[adenosine deaminase]-[Cas9 domain]-COOH;

[0709] NH₂-NLS [Cas9 domain]-[adenosine deaminase]-COOH;

[0710] NH₂-[adenosine deaminase]-[Cas9 domain]-NLS—COOH; or

[0711] NH₂-[Cas9 domain]-[adenosine deaminase]-NLS—COOH.

[0712] In some embodiments, the NLS is present in a linker or the NLS is flanked by linkers, for example described herein. A bipartite NLS comprises two basic amino acid clusters, which are separated by a relatively short spacer sequence (hence bipartite—2 parts, while monopartite NLSs are not). The NLS of nucleoplasmin, KR[PAATKKAGQA]KKKK, is the prototype of the ubiquitous bipartite signal: two clusters of basic amino acids, separated by a spacer of about 10 amino acids.

[0713] The sequence of an exemplary bipartite NLS follows: PKKKRKVEGADKRTADGSEFES PKKKRKV

[0714] In some embodiments, the fusion proteins comprising a cytidine or adenosine deaminase, a Cas9 domain, and an NLS do not comprise a linker sequence. In some embodiments, linker sequences between one or more of the domains or proteins (e.g., cytidine or adenosine deaminase, Cas9 domain or NLS) are present.

[0715] It should be appreciated that the fusion proteins of the present disclosure may comprise one or more additional features. For example, in some embodiments, the fusion protein may comprise inhibitors, cytoplasmic localization sequences, export sequences, such as nuclear export sequences, or other localization sequences, as well as sequence tags that are useful for solubilization, purification, or detection of the fusion proteins. Suitable protein tags provided herein include, but are not limited to, biotin carboxylase carrier protein (BCCP) tags, myc-tags, calmodulin-tags, FLAG-tags, hemagglutinin (HA)-tags, polyhistidine tags, also referred to as histidine tags or His-tags, maltose binding protein (MBP)-tags, nus-tags, glutathione-S-transferase (GST)-tags, green fluorescent protein (GFP)-tags, thioredoxin-tags, S-tags, Softags (e.g., Softag 1, Softag 3), strep-tags, biotin ligase tags, FlAsH tags, V5 tags, and SBP-tags. Additional suitable sequences will be apparent to those of skill in the art. In some embodiments, the fusion protein comprises one or more His tags.

### Linkers

[0716] In certain embodiments, linkers may be used to link any of the peptides or peptide domains of the invention. The linker may be as simple as a covalent bond, or it may be a polymeric linker many atoms in length. In certain embodiments, the linker is a polypeptide or based on amino acids. In other embodiments, the linker is not peptide-like. In certain embodiments, the linker is a covalent bond (e.g., a carbon-carbon bond, disulfide bond, carbon-heteroatom bond, etc.). In certain embodiments, the linker is a carbon-nitrogen bond of an amide linkage. In certain embodiments, the linker is a cyclic or acyclic, substituted or unsubstituted, branched or unbranched aliphatic or heteroaliphatic linker. In certain embodiments, the linker is polymeric (e.g., polyethylene, polyethylene glycol, polyamide, polyester, etc.). In certain embodiments, the linker comprises a monomer, dimer, or polymer of aminoalkanoic acid. In certain embodiments, the linker comprises an aminoalkanoic acid (e.g., glycine, ethanoic acid, alanine, beta-alanine, 3-aminopropanoic acid, 4-aminobutanoic acid, 5-pentanoic acid, etc.). In certain embodiments, the linker comprises a monomer, dimer, or polymer of aminohexanoic acid (Ahx). In certain embodiments, the linker is based on a carbocyclic moiety (e.g., cyclopentane, cyclohexane). In other embodiments, the linker comprises a polyethylene glycol moiety (PEG). In other embodiments, the linker comprises amino acids. In certain embodiments, the linker comprises a peptide. In certain embodiments, the linker comprises an aryl or heteroaryl moiety. In certain embodiments, the linker is based on a phenyl ring. The linker may include functionalized moieties to facilitate attachment of a nucleophile (e.g., thiol, amino) from the peptide to the linker. Any electrophile may be used as part of the linker. Exemplary electrophiles include, but are not limited to, activated esters, activated amides, Michael acceptors, alkyl halides, aryl halides, acyl halides, and isothiocyanates.

[0717] In some embodiments, the linker is an amino acid or a plurality of amino acids (e.g., a peptide or protein). In some embodiments, the linker is a bond (e.g., a covalent bond), an organic molecule, group, polymer, or chemical moiety. In some embodiments, the cytidine or adenosine deaminase and the napDNAbp are fused via a linker that comprises 4, 16, 32, or 104 amino acids in length. In some embodiments, the linker is about 3 to about 104 amino acids in length. In some embodiments, any of the fusion proteins provided herein, comprise a cytidine or adenosine deaminase and a Cas9 domain that are fused to each other via a linker. e.g., Various linker lengths and flexibilities between the cytidine or adenosine deaminase and the Cas9 domain can be employed (e.g., ranging from very flexible linkers of the form (GGGS)ₙ, (GGGGS)ₙ, and (G)ₙ to more rigid linkers of the form (EAAAK)ₙ, (SGGS)ₙ, SGSETPGTSESATPES (see, e.g., Guilinger J P, Thompson D B, Liu D R. Fusion of catalytically inactive Cas9 to FokI nuclease improves the specificity of genome modification. Nat. Biotechnol. 2014; 32(6): 577-82; the entire contents are incorporated herein by reference) and (XP)ₙ) in order to achieve the optimal length for activity for the cytidine or adenosine deaminase nucleobase editor. In some embodiments, n is 1, 2, 3, 4, 5, 6, 7, 8, 9, 10, 11, 12, 13, 14, or 15. In some embodiments, the linker comprises a (GGS)ₙ motif, wherein n is 1, 3, or 7. In some embodiments, cytidine deaminase or adenosine deaminase and the Cas9 domain of any of the fusion proteins provided herein are fused via a linker comprising the amino acid sequence SGSETPGTSESATPES.

Cas9 Complexes with Guide RNAs

[0718] Some aspects of this disclosure provide complexes comprising any of the fusion proteins provided herein, and a guide RNA bound to a Cas9 domain (e.g., a dCas9, a nuclease active Cas9, or a Cas9 nickase) of fusion protein. These complexes are also termed ribonucleoproteins (RNPs). In some embodiments, the guide nucleic acid (e.g., guide RNA) is from 15-100 nucleotides long and comprises a sequence of at least 10 contiguous nucleotides that is complementary to a target sequence. In some embodiments, the guide RNA is 15, 16, 17, 18, 19, 20, 21, 22, 23, 24, 25, 26, 27, 28, 29, 30, 31, 32, 33, 34, 35, 36, 37, 38, 39, 40, 41, 42, 43, 44, 45, 46, 47, 48, 49, or 50 nucleotides long. In some embodiments, the guide RNA comprises a sequence of 15, 16, 17, 18, 19, 20, 21, 22, 23, 24, 25, 26, 27, 28, 29, 30, 31, 32, 33, 34, 35, 36, 37, 38, 39, or 40 contiguous nucleotides that is complementary to a target sequence. In some embodiments, the target sequence is a DNA sequence. In some embodiments, the target sequence is an RNA sequence. In some embodiments, the target sequence is a sequence in the genome of a mammal. In some embodiments, the target sequence is a sequence in the genome of a human. In some embodiments, the 3′ end of the target sequence is immediately adjacent to a canonical PAM sequence (NGG). In some embodiments, the guide nucleic acid (e.g., guide RNA) is complementary to a sequence associated with a disease or disorder.

[0719] In some embodiments, the guide RNA is designed to disrupt a splice site (i.e., a splice acceptor (SA) or a splice donor (SD). In some embodiments, the guide RNA is designed such that the base editing results in a premature STOP codon. Tables 8A Table 8B and Table 8C provide a nonexhaustive list of gRNA target sequences designed to disrupt a splice site or to result in a premature STOP codon.

[0720] Provided herein are compositions and methods for base editing in host cells, e.g. immune cells. Further provided herein are compositions comprising a guide polynucleic acid sequence, e.g. a guide RNA sequence, or a combination of 2, 3, 4, 5, 6, 7, 8, 9, 10, 11, 12, 13, 14, 15, 16, 17, 18, 19, 20, or more guide RNAs as provided herein. In some embodiments, a composition for base editing as provided herein further comprises a polynucleotide that encodes a base editor, e.g. a C-base editor or an A-base editor. For example, a composition for base editing may comprise a mRNA sequence encoding a BE, a BE4, an ABE, and a combination of one or more guide RNAs as provided. A composition for base editing may comprise a base editor polypeptide and a combination of one or more of any guide RNAs provided herein. Such a composition may be used to effect base editing in an immune cell through different delivery approaches, for example, electroporation, nucleofection, viral transduction or transfection. In some embodiments, the composition for base editing comprises an mRNA sequence that encodes a base editor and a combination of one or more guide RNA sequences provided herein for electroporation.

TABLE 8A
gRNAs: Splice Site and STOP Codons

| | | | gRNA |
|---|---|---|---|
| | | Targeting | Spacer |
| Gene | Description | sequence | Sequence |
| VISTA | Exon 1 SD | CCTTACCTAG | CCUUACCUAG |
| | (pos6) | GGACGCAGCC | GGACGCAGCC |
| | Exon 1 STOP | GGATCCCCAG | GGAUCCCCAG |
| | (pos7) | CGCCAGCTGC | CGCCAGCUGC |
| | Exon 1 STOP | AGCGCCAGCT | AGCGCCAGCU |
| | (pos5) | GCCGGCCTCC | GCCGGCCUCC |
| | Exon 1 STOP | GCGCCAGCTG | GCGCCAGCUG |
| | (pos4) | CCGGCCTCCA | CCGGCCUCCA |
| | Exon 2 STOP | CCTGGCTCAG | CCUGGCUCAG |
| | (pos8) | CGCCACGGGC | CGCCACGGGC |
| | Exon 2 STOP | GCTGCAGGTG | GCUGCAGGUG |
| | (pos5) | CAGACAGGTG | CAGACAGGUG |
| | Exon 2 STOP | GCGGTACCAC | GCGGUACCAC |
| | (pos7) | GTCTTGTAGA | GUCUUGUAGA |
| | Exon 3 SA | TGCCTGTGGG | UGCCUGUGGG |
| | (pos4) | AACAAACAGA | AACAAACAGA |
| | Exon 3 SD | CTTACTTTCA | CUUACUUUCA |
| | (pos5) | CTATCCTGGG | CUAUCCUGGG |
| | Exon 3 SD | TCCCTTACTT | UCCCUUACUU |
| | (pos8) | TCACTATCCT | UCACUAUCCU |
| | Exon 3 STOP | CTCCCAGGAT | CUCCCAGGAU |
| | (pos5) | AGTGAAAGTA | AGUGAAAGUA |
| | Exon 4 SA | TGATGTCTGA | UGAUGUCUGA |
| | (pos7) | AAGGGCAGAG | AAGGGCAGAG |
| | Exon 5 STOP | TGCCCAGGAG | UGCCCAGGAG |
| | (pos5) | CTGGTGCGGA | CUGGUGCGGA |
| | Exon 6 SA | TTGCTGCCAC | UUGCUGCCAC |
| | (pos4) | AGAACCAGAA | AGAACCAGAA |
| | Exon 6 STOP | ATTCAAGGGA | AUUCAAGGGA |
| | (pos4) | TTGAAAACCC | UUGAAAACCC |
| | Exon 6 STOP | ACCTGCCCAG | ACCUGCCCAG |
| | (pos8) | GGGATACCCG | GGGAUACCCG |
| | Exon 6 STOP | CAGCGGCAGC | CAGCGGCAGC |
| | (pos7) | CTTCTGAGTC | CUUCUGAGUC |
| TRAC | Exon 1 STOP 1 | GCTACAAACA | GCUACAAACA |
| | (pos5) | AGCTCATCTT | AGCUCAUCUU |
| | Exon 1 STOP 2 | CCAGCCAAGT | CCAGCCAAGU |
| | (pos6) | ACGTAAGTAG | ACGUAAGUAG |
| | Exon 1 SA | CTGGATATCT | CUGGAUAUCU |
| | (pos9) | GTGGGACAAG | GUGGGACAAG |
| | Exon 1 SD | CTTACCTGGG | CUUACCUGGG |
| | | CTGGGGAAGA | CUGGGGAAGA |
| | Exon 3SA | TTCGTATCTG | UUCGUAUCUG |
| | | TAAAACCAAG | UAAAACCAAG |
| | Exon 3 STOP | TTTCAAAACC | UUUCAAAACC |
| | | TGTCAGTGAT | UGUCAGUGAU |
| | Exon 3 STOP | TTCAAAACCT | UUCAAAACCU |
| | | GTCAGTGATT | GUCAGUGAUU |
| Tim-3 | Exon 2 SA | GGACCCTGCA | GGACCCUGCA |
| | (pos6) | TAGAGAGAGA | UAGAGAGAGA |
| | Exon 2 STOP | TGCCCCAGCA | UGCCCCAGCA |
| | (pos5) | GACGGGCACG | GACGGGCACG |
| | Exon 3 SD | GTTACCTGGG | GUUACCUGGG |
| | (pos5) | CCATGTCCCC | CCAUGUCCCC |
| | Exon 4 SD | CTTACTGTTA | CUUACUGUUA |
| | (pos5) | GATTTATATC | GAUUUAUAUC |
| | Exon 4 SD | TTACTGTTAG | UUACUGUUAG |
| | (pos4) | ATTTATATCA | AUUUAUAUCA |
| | Exon 5 SA | TTTGCTATGG | UUUGCUAUGG |
| | (pos5) | AAACACAAAC | AAACACAAAC |
| | Exon 5 STOP | TCCATAGCAA | UCCAUAGCAA |
| | (pos8) | ATATCCACAT | AUAUCCACAU |
| | Exon 7 STOP | GCAGCAACCC | GCAGCAACCC |
| | (pos5) | TCACAACCTT | UCACAACCUU |
| | Exon 7 STOP | CAGCAACCCT | CAGCAACCCU |
| | (pos 4) | CACAACCTTT | CACAACCUUU |
| TIGIT | Exon 1 STOP | AGGCAGGCTC | AGGCAGGCUC |
| | (pos4) | CCCTCGCCTC | CCCUCGCCUC |
| | Exon 2 STOP | GGAGCAGCAG | GGAGCAGCAG |
| | (5&8) | GACCAGCTTC | GACCAGCUUC |
| | Exon 2 SD | CAGGAATACC | CAGGAAUACC |
| | (pos9) | TGAGCTTTCT | UGAGCUUUCU |
| | Exon 3 STOP | AGGTTCCAGA | AGGUUCCAGA |
| | (pos7) | TTCCATTGCT | UUCCAUUGCU |
| | Exon 1 STOP | CTGGGCCCAG | CUGGGCCCAG |
| | | GGGCTGAGGC | GGGCUGAGGC |
| | Exon 2 STOP | GATCGAGTGG | GAUCGAGUGG |
| | | CCCCAGGTCC | CCCCAGGUCC |
| TGFbRII | Exon 1 SD | TCACCCGACT | UCACCCGACU |
| | (JMG79) | TCTGAACGTG | UCUGAACGUG |
| | Exon 3 SD | TTACCTGCCC | UUACCUGCCC |
| | (JMG83) | ACTGTTAGCC | ACUGUUAGCC |
| | Exon 2 STOP | GAAGCCACAG | GAAGCCACAG |
| | (JMG80) | GAAGTCTGTG | GAAGUCUGUG |
| | Exon 3 STOP | ACTCCAGTTC | ACUCCAGUUC |
| | (JMG81) | CTGACGGCTG | CUGACGGCUG |
| | Exon 3 STOP | ACCTACAGGA | ACCUACAGGA |
| | (JMG82) | GTACCTGACG | GUACCUGACG |
| | Exon 4 STOP | TTCCCAGAGC | UUCCCAGAGC |
| | (JMG84) | ACCAGAGCCA | ACCAGAGCCA |
| | Exon 1 STOP | ACGTTCAGAA | ACGUUCAGAA |
| | (JMG85) | GTCGGGTGAG | GUCGGGUGAG |
| | Exon 3 STOP | TTCAGAGCAG | UUCAGAGCAG |
| | (pos8) | TTTGAGACAG | UUUGAGACAG |
| | Exon 1 SD | TCACCCGACT | UCACCCGACU |
| | | TCTGAACGTG | UCUGAACGUG |
| | Exon 1 Stop | ACGTTCAGAA | ACGUUCAGAA |
| | | GTCGGGTGAG | GUCGGGUGAG |
| | Exon 2 SD 1 | TTTACTATGT | UUUACUAUGU |
| | | CTCAGTGGAT | CUCAGUGGAU |
| | Exon 2 SD2 | CTTTACTATG | CUUUACUAUG |
| | | TCTCAGTGGA | UCUCAGUGGA |
| | Exon 3 STOP | GAAGCCACAG | GAAGCCACAG |
| | | GAAGTCTGTG | GAAGUCUGU |
| | | | G |
| | Exon 6 SD | TTACCTGCCC | UUACCUGCCC |
| | | ACTGTTAGCC | ACUGUUAGCC |
| | Exon 6 STOP 1 | TTCAGAGCAG | UUCAGAGCAG |
| | | TTTGAGACAG | UUUGAGACAG |
| | Exon 6 STOP 2 | ACTCCAGTTC | ACUCCAGUUC |
| | | CTGACGGCTG | CUGACGGCUG |
| | Exon 6 STOP | ACCTACAGGA | ACCUACAGGA |
| | | GTACCTGACG | GUACCUGACG |
| | Exon 7 STOP | TTCCCAGAGC | UUCCCAGAGC |
| | | ACCAGAGCCA | ACCAGAGCCA |
| | Exon 8 STOP | AGCCAGAAGC | AGCCAGAAGC |
| | | TGGGAATTTC | UGGGAAUUUC |
| | Isoform ATG | TATCATGTCG | UAUCAUGUCG |
| | | TTATTAACTG | UUAUUAACUG |
| RFXANK | Exon 2 SA | CCTGCTGGGA | CCUGCUGGGA |
| | (JMG8) | AACAGACAAC | AACAGACAAC |
| | Exon 2 SD | CACTCACAGT | CACUCACAGU |
| | (JMG9) | CTAGGGTGGC | CUAGGGUGGC |
| | Exon 2 STOP | CAACCGGCAG | CAACCGGCAG |
| | (pos8) | CGAGGGAACG | CGAGGGAACG |
| | Exon 3 SA | ACAGGGCTGG | ACAGGGCUGG |
| | (pos7) | GGCAGGACAG | GGCAGGACAG |
| | Exon 3 STOP | CATCCACCAG | CAUCCACCAG |
| | (pos8) | CTCGCAGCAC | CUCGCAGCAC |
| | Exon 3 STOP | ATCCACCAGC | AUCCACCAGC |
| | (pos7) | TCGCAGCACA | UCGCAGCACA |
| | Exon 3 STOP | TCCACCAGCT | UCCACCAGCU |
| | (pos6) | CGCAGCACAG | CGCAGCACAG |
| | Exon 3 STOP | CCACCAGCTC | CCACCAGCUC |
| | (pos5) | GCAGCACAGG | GCAGCACAGG |
| | Exon 4 SA | TGTCACCTGG | UGUCACCUGG |
| | (JMG10) | CAGGAGGAGG | CAGGAGGAGG |
| | Exon 4 SA | GTCACCTGGC | GUCACCUGGC |
| | (pos6) | AGGAGGAGGC | AGGAGGAGGC |
| | Exon 5 SA | GGCACCCTGC | GGCACCCUGC |
| | (pos7) | AGGGAGAAGA | AGGGAGAAGA |
| | Exon 5 SA | GCACCCTGCA | GCACCCUGCA |
| | (JMG11) | GGGAGAAGAA | GGGAGAAGAA |
| | Exon 6 SA | ATTCTGTCGT | AUUCUGUCGU |
| | (pos4) | GGGTAGGGGC | GGGUAGGGGC |
| | Exon 6 SA | CTCCATTCTG | CUCCAUUCUG |
| | (JMG12) | TCGTGGGTAG | UCGUGGGUAG |
| | Exon 7 SA | CCTCGGGCTG | CCUCGGGCUG |
| | (pos8) | CAAAGGAGAG | CAAAGGAGAG |
| | Exon 7 SA | CGGGCTGCAA | CGGGCUGCAA |
| | (pos5) | AGGAGAGGGG | AGGAGAGGGG |
| | Exon 7 SD | GCTGACCTTT | GCUGACCUUU |
| | (pos6) | CCGGTATCCC | CCGGUAUCCC |
| | Exon 7 SD | CTGACCTTTC | CUGACCUUUC |
| | (pos5) | CGGTATCCCA | CGGUAUCCCA |
| | Exon 8 SA | TGTTGCACTG | UGUUGCACUG |
| | (pos8) | AGATGGGGCA | AGAUGGGGCA |
| | Exon 8 SA | CTGTTGCACT | CUGUUGCACU |
| | (pos9) | GAGATGGGGC | GAGAUGGGGC |
| PVRIG | Exon 1 STOP | GCCCTGCAGC | GCCCUGCAGC |
| (CD112 | (pos7) | CCCCAGAACC | CCCCAGAACC |
| R) | | | |
| | Exon 1 SD | CTCACCCGCA | CUCACCCGCA |
| | (pos5) | GTGACACACA | GUGACACACA |
| | Exon 1 STOP | GCAGCACCCA | GCAGCACCCA |
| | (pos8) | GGGCAGGACC | GGGCAGGACC |
| | Exon 1 STOP | CAGCACCCAG | CAGCACCCAG |
| | (pos7) | GGCAGGACCA | GGCAGGACCA |
| | Exon 2 SA | GTCCCTGTGG | GUCCCUGUGG |
| | (pos5) | AACAGCAGCA | AACAGCAGCA |
| | Exon 2 STOP | GTGGGTTCAA | GUGGGUUCAA |
| | (pos8) | GTTCGGATGG | GUUCGGAUGG |
| | Exon 2 SD | GCCCCACCTG | GCCCCACCUG |
| | (pos 7) | GGTCTGAGCT | GGUCUGAGCU |
| | Exon 2 SD | GGCCCCACCT | GGCCCCACCU |
| | (pos8) | GGGTCTGAGC | GGGUCUGAGC |
| | Exon 2 SD | CCACCTGGGT | CCACCUGGGU |
| | (pos4) | CTGAGCTGGG | CUGAGCUGGG |
| | Exon 2 STOP | AGGCCTCCCA | AGGCCUCCCA |
| | (pos8) | GGAGCCCTCA | GGAGCCCUCA |
| | Exon 2 STOP | CTCCCAGGAG | CUCCCAGGAG |
| | (pos4) | CCCTCAGGGA | CCCUCAGGGA |
| | Exon 2 STOP | CCCCCAGCTC | CCCCCAGCUC |
| | (pos4) | ACAGTCACCA | ACAGUCACCA |
| | Exon 3 SD | GGTCTCACCG | GGUCUCACCG |
| | (pos8) | GTGCTTATGT | GUGCUUAUGU |
| | Exon 3 STOP | TGCTGCGCCG | UGCUGCGCCG |
| | (pos9) | ACATAAGCAC | ACAUAAGCAC |
| | Exon 4 SA | GGCAGGGCTG | GGCAGGGCUG |
| | (pos8) | GGAGAGAGCA | GGAGAGAGCA |
| | Exon 4 STOP | CGAGAGCACG | CGAGAGCACG |
| | (pos9) | AGCATGGGTG | AGCAUGGGUG |
| | Exon 4 STOP | GAGCACGAGC | GAGCACGAGC |
| | (pos6) | ATGGGTGAGG | AUGGGUGAGG |
| | Exon 4 STOP | AGCACGAGCA | AGCACGAGCA |
| | (pos5) | TGGGTGAGGA | UGGGUGAGGA |
| | Exon 4 STOP | GCACGAGCAT | GCACGAGCAU |
| | (pos4) | GGGTGAGGAG | GGGUGAGGAG |
| | Exon 4 SD | CTCACCCATG | CUCACCCAUG |
| | (pos5) | CTCGTGCTCT | CUCGUGCUCU |
| | Exon 5 SA | GGTGCCTGCG | GGUGCCUGCG |
| | (pos6) | CGGGGGAAGG | CGGGGGAAGG |
| | Exon 5 SA | GTGCCTGCGC | GUGCCUGCGC |
| | (pos5) | GGGGGAAGGA | GGGGGAAGGA |
| | Exon 5 SA | CTTGGTGCCT | CUUGGUGCCU |
| | (pos9) | GCGCGGGGGA | GCGCGGGGGA |
| | Exon 5 STOP | GGCCCCAGGG | GGCCCCAGGG |
| | (pos6) | CCCTGCCGCC | CCCUGCCGCC |
| | Exon 5 STOP | TCTACGCTCA | UCUACGCUCA |
| | (pos9) | GGCAGGGGAG | GGCAGGGGAG |
| | Exon 5 STOP | CCACCAGGAC | CCACCAGGAC |
| | (pos4) | GGCCCCCCAT | GGCCCCCCAU |
| | Exon 5 STOP | AGGCCCAGGC | AGGCCCAGGC |
| | (pos5) | GGCAGGGCCC | GGCAGGGCCC |
| | Exon 5 STOP | GGCCCAGGCG | GGCCCAGGCG |
| | (pos4) | GCAGGGCCCT | GCAGGGCCCU |
| PDCD1 | Exon 1 STOP 2 | ACGACTGGCC | ACGACUGGCC |
| | (pos9) | AGGGCGCCTG | AGGGCGCCUG |
| | Exon 1 STOP 4 | CACCGCCCAG | CACCGCCCAG |
| | (pos7) | ACGACTGGCC | ACGACUGGCC |
| | Exon 1 STOP | CTACAACTGG | CUACAACUGG |
| | (pos4) | GCTGGCGGCC | GCUGGCGGCC |
| | Exon 1 SD | CACCTACCTA | CACCUACCUA |
| | | AGAACCATCC | AGAACCAUCC |
| | Exon 2 SA | GGAGTCTGAG | GGAGUCUGAG |
| | | AGATGGAGAG | AGAUGGAGAG |
| | Exon 2 STOP 1 | CAGCAACCAG | CAGCAACCAG |
| | (pos8) | ACGGACAAGC | ACGGACAAGC |
| | Exon 2 STOP 2 | GTGTCACACA | GUGUCACACA |
| | (pos9) | ACTGCCCAAC | ACUGCCCAAC |
| | Exon 3 STOP 1 | AGCCGGCCAG | AGCCGGCCAG |
| | (pos8) | TTCCAAACCC | UUCCAAACCC |
| | Exon 3 STOP | CAGTTCCAAA | CAGUUCCAAA |
| | (pos7) | CCCTGGTGGT | CCCUGGUGGU |
| | Exon 3 STOP 2 | CGGCCAGTTC | CGGCCAGUUC |
| | (pos5) | CAAACCCTGG | CAAACCCUGG |
| | Exon 3 STOP | GGACCCAGAC | GGACCCAGAC |
| | (pos5) | TAGCAGCACC | UAGCAGCACC |
| | Exon 3 SD | GACGTTACCT | GACGUUACCU |
| | | CGTGCGGCCC | CGUGCGGCCC |
| | Exon 4 SA | TCCCTGCAGA | UCCCUGCAGA |
| | | GAAACACACT | GAAACACACU |
| | Exon 4 SD | GAGACTCACC | GAGACUCACC |
| | | AGGGGCTGGC | AGGGGCUGGC |
| | Exon 5 SA | CCTCCTTCTT | CCUCCUUCUU |
| | | TGAGGAGAAA | UGAGGAGAAA |
| | Exon 2 STOP | GGGGTTCCAG | GGGGUUCCAG |
| | (pos 7) | GGCCTGTCTG | GGCCUGUCUG |
| | Exon 3 SA | TTCTCTCTGG | UUCUCUCUGG |
| | | AAGGGCACAA | AAGGGCACAA |
| | Exon 5 STOP 1 | CCAGTGGCGA | CCAGUGGCGA |
| | (pos 8) | GAGAAGACCC | GAGAAGACCC |
| | Exon 5 STOP 2 | TGCCCAGCCA | UGCCCAGCCA |
| | (pos 5) | CTGAGGCCTG | CUGAGGCCUG |
| | Exon 1 STOP 1 | CGACTGGCCA | CGACUGGCCA |
| | (pos8) | GGGCGCCTGT | GGGCGCCUGU |
| | Exon 1 STOP 3 | ACCGCCCAGA | ACCGCCCAGA |
| | (pos6) | CGACTGGCCA | CGACUGGCCA |
| Lag3 | Exon 1 STOP | GTTTCTGCAG | GUUUCUGCAG |
| | (pos8) | CCGCTTTGGG | CCGCUUUGGG |
| | Exon 1 SD | TTACCTGGAG | UUACCUGGAG |
| | (pos4) | CCACCCAAAG | CCACCCAAAG |
| | Exon 2 SA | TCACTAGGTG | UCACUAGGUG |
| | (pos4) | AGCAAAAGAG | AGCAAAAGAG |
| | Exon 2 STOP | GCCTCTCCAG | GCCUCUCCAG |
| | (pos8) | CCAGGGGCTG | CCAGGGGCUG |
| | Exon 2 STOP | CTTGGCAGCA | CUUGGCAGCA |
| | (pos 6) | TCAGCCAGAC | UCAGCCAGAC |
| | Exon 3 SA | CCACTGGGCG | CCACUGGGCG |
| | (pos4) | GGAAAGAGAA | GGAAAGAGAA |
| | Exon 3 SD | ACATACTCGA | ACAUACUCGA |
| | (pos6) | GGCCTGGCCC | GGCCUGGCCC |
| | Exon 3 STOP | CCTGCAGCCC | CCUGCAGCCC |
| | (pos5) | CGCGTCCAGC | CGCGUCCAGC |
| | Exon 3 STOP | CGCGTCCAGC | CGCGUCCAGC |
| | (pos7) | TGGATGAGCG | UGGAUGAGCG |
| | Exon 3 STOP | TGGGCCAGGC | UGGGCCAGGC |
| | (pos6) | CTCGAGTATG | CUCGAGUAUG |
| | Exon 4 SD | GGGAGTTACC | GGGAGUUACC |
| | (pos4) | CAGAACAGTG | CAGAACAGUG |
| | Exon 4 STOP | CCTGCCCCAA | CCUGCCCCAA |
| | (pos8) | GTCAGCCCCA | GUCAGCCCCA |
| | Exon 4 STOP | GCCAGGGCCG | GCCAGGGCCG |
| | (pos9) | AGTCCCTGTC | AGUCCCUGUC |
| | Exon 4 STOP | CCAGGGCCGA | CCAGGGCCGA |
| | (pos8) | GTCCCTGTCC | GUCCCUGUCC |
| | Exon 4 STOP | GCCCCAGGGC | GCCCCAGGGC |
| | (pos4) | CCAGAGTCCA | CCAGAGUCCA |
| | Exon 5 STOP | ATGTGAGCCA | AUGUGAGCCA |
| | (pos9) | GGCCCAGGCT | GGCCCAGGCU |
| | Exon 5 STOP | GAGGAGTCCA | GAGGAGUCCA |
| | (pos 8) | CTTGGCAGTG | CUUGGCAGUG |
| | Exon 6 SA | GAGTCACTGA | GAGUCACUGA |
| | (pos7) | AAAGAGTAGA | AAAGAGUAGA |
| | Exon 6 STOP | CTGGACAAGA | CUGGACAAGA |
| | (pos6) | ACGCTTTGTG | ACGCUUUGUG |
| | Exon 6 STOP | CCATCCCAGA | CCAUCCCAGA |
| | (pos7) | GGAGTTTCTC | GGAGUUUCUC |
| | Exon 6 STOP | TGGCAATGCC | UGGCAAUGCC |
| | (pos4) | AGCTGTACCA | AGCUGUACCA |
| | Exon 6 STOP | TACCAGGGGG | UACCAGGGGG |
| | (pos4) | AGAGGCTTCT | AGAGGCUUCU |
| | Exon 6 STOP | GGCATTGCCA | GGCAUUGCCA |
| | (pos8) | AGGCTGGGAA | AGGCUGGGAA |
| | Exon 7 SA | GGCACCTATG | GGCACCUAUG |
| | (pos6) | GAGAAAGTAC | GAGAAAGUAC |
| | Exon 7 STOP | AGACAGGTGA | AGACAGGUGA |
| | (pos4) | GCCAGGGACA | GCCAGGGACA |
| | Exon 7 SD | GGCTCACCTG | GGCUCACCUG |
| | (pos7) | TCTTCTCCAA | UCUUCUCCAA |
| | Exon 8 SA | GTCGCCACTG | GUCGCCACUG |
| | (pos8) | TGAGAAGAGA | UGAGAAGAGA |
| | Exon 8 STOP | GCAGGCTCAG | GCAGGCUCAG |
| | (pos8) | AGCAAGATAG | AGCAAGAUAG |
| | Exon 8 STOP | GCTGGAGCAA | GCUGGAGCAA |
| | (pos8) | GAACCGGAGC | GAACCGGAGC |
| CTLA-4 | Exon 1 SD | ACTCACCTTT | ACUCACCUUU |
| | (pos 6) | GCAGAAGACA | GCAGAAGACA |
| | Exon 1 SD | CACTCACCTT | CACUCACCUU |
| | | TGCAGAAGAC | UGCAGAAGAC |
| | Exon 1 STOP | AGGGCCAGGT | AGGGCCAGGU |
| | (pos5) | CCTGGTAGCC | CCUGGUAGCC |
| | Exon 2 STOP | GGCCCAGCCT | GGCCCAGCCU |
| | | GCTGTGGTAC | GCUGUGGUAC |
| | Exon 2 STOP | GCTTCGGCAG | GCUUCGGCAG |
| | (pos 8) | GCTGACAGCC | GCUGACAGCC |
| | Exon 2 STOP | TATCCAAGGA | UAUCCAAGGA |
| | | CTGAGGGCCA | CUGAGGGCCA |
| | Exon 2 STOP | GGAACCCAGA | GGAACCCAGA |
| | | TTTATGTAAT | UUUAUGUAAU |
| | Exon 2 SD | GCTCACCAAT | GCUCACCAAU |
| | | TACATAAATC | UACAUAAAUC |
| | Exon 2 SD | CTCACCAATT | CUCACCAAUU |
| | | ACATAAATCT | ACAUAAAUCU |
| | Exon 1 STOP | CTCAGCTGAA | CUCAGCUGAA |
| | | CCTGGCTACC | CCUGGCUACC |
| Chi3l1 | Exon 1 STOP | GGCGTCTCAA | GGCGUCUCAA |
| | (pos8) | ACAGGTATCT | ACAGGUAUCU |
| | Exon 1 SA | CAAAGCCTGA | CAAAGCCUGA |
| | (pos7) | AGAGAAATCC | AGAGAAAUCC |
| | Exon 3 SA | AGAGCCTGAA | AGAGCCUGAA |
| | (pos6) | GGAGAAGTCT | GGAGAAGUCU |
| | Exon 3 STOP | TCCCAGTACC | UCCCAGUACC |
| | (pos4) | GGGAAGGCGA | GGGAAGGCGA |
| | Exon 4 SA | GGTTCCTGTG | GGUUCCUGUG |
| | (pos6) | GAGCACAGGG | GAGCACAGGG |
| | Exon 4 SA | TGGGGTTCCT | UGGGGUUCCU |
| | (pos9) | GTGGAGCACA | GUGGAGCACA |
| | Exon 6 SA | TCATTTCCTA | UCAUUUCCUA |
| | (pos8) | GATGGGAGAC | GAUGGGAGAC |
| | Exon 6 SA | TTCCTAGATG | UUCCUAGAUG |
| | (pos4) | GGAGACAGGC | GGAGACAGGC |
| | Exon 8 SA | CCAGGTGTCT | CCAGGUGUCU |
| | (pos9) | GAGGAGGAAG | GAGGAGGAAG |
| | Exon 8 SA | GTGTCTGAGG | GUGUCUGAGG |
| | (pos5) | AGGAAGGGGA | AGGAAGGGGA |
| | Exon 9 SA | TAGTCCTGGG | UAGUCCUGGG |
| | (pos6) | TGGGGTAGGG | UGGGGUAGGG |
| | Exon 9 SA | AGTCCTGGGT | AGUCCUGGGU |
| | (pos5) | GGGGTAGGGT | GGGGUAGGGU |
| | Exon 9 SD | CATTACCTCA | CAUUACCUCA |
| | (pos6) | TAGTAGGCAA | UAGUAGGCAA |
| | Exon 9 SD | CCATTACCTC | CCAUUACCUC |
| | (pos7) | ATAGTAGGCA | AUAGUAGGCA |
| | Exon 10 SA | ACAGATCTGA | ACAGAUCUGA |
| | (pos7) | GCAGATAACA | GCAGAUAACA |
| | Exon 10 STOP | TCCTACCCAC | UCCUACCCAC |
| | (pos 7) | TGGTTGCCCT | UGGUUGCCCU |
| | Exon 11 STOP | AGGTGCAGTA | AGGUGCAGUA |
| | (pos7) | CCTGAAGGAC | CCUGAAGGAC |
| | Exon 11 STOP | CAGGCAGCTG | CAGGCAGCUG |
| | (pos5) | GCGGGCGCCA | GCGGGCGCCA |
| | Exon 11 STOP | GACTTCCAGG | GACUUCCAGG |
| | (pos7) | GCTCCTTCTG | GCUCCUUCUG |
| CD96 | Exon 1 STOP | CATCCAGATA | CAUCCAGAUA |
| | (pos5) | CATTTTGTCA | CAUUUUGUCA |
| | Exon 2 STOP | ACCTGCCAAA | ACCUGCCAAA |
| | (pos5) | CACAGACAGT | CACAGACAGU |
| | Exon 2 STOP | CGTGCAGATG | CGUGCAGAUG |
| | (pos7) | CAATGGTCCA | CAAUGGUCCA |
| | Exon 3 SA | TGTAACTGTA | UGUAACUGUA |
| | (pos6) | ACAAAACATA | ACAAAACAUA |
| | Exon 3 SD | ACTTACCACC | ACUUACCACC |
| | (pos6) | GACCATGCAT | GACCAUGCAU |
| | Exon 5 SD | CTTACCAAAA | CUUACCAAAA |
| | (pos5) | ACCTTGACTG | ACCUUGACUG |
| | Exon 5 STOP | CCAGTCCAAA | CCAGUCCAAA |
| | (pos6) | TCTTCGATGA | UCUUCGAUGA |
| | Exon 5 STOP | CAGTCCAAAT | CAGUCCAAAU |
| | (pos7) | CTTCGATGAT | CUUCGAUGAU |
| | Exon 7 STOP | AAACCATGTG | AAACCAUGUG |
| | (pos4) | ATATTTGCTT | AUAUUUGCUU |
| | Exon 8 STOP | ATGTTCCACA | AUGUUCCACA |
| | (pos6) | CTTTATTTCC | CUUUAUUUCC |
| | Exon 10 SD | TCACGTTGAG | UCACGUUGAG |
| | (pos4) | GAGTGGTGTT | GAGUGGUGUU |
| | Exon 13 SA | CATTGTCTAG | CAUUGUCUAG |
| | (pos7) | GGATATAAAG | GGAUAUAAAG |
| | Exon 13 SA | ACATTGTCTA | ACAUUGUCUA |
| | (pos8) | GGGATATAAA | GGGAUAUAAA |
| | Exon 13 SA | GACATTGTCT | GACAUUGUCU |
| | (pos9) | AGGGATATAA | AGGGAUAUAA |
| | Exon 14 STOP | TGGCCAGGAC | UGGCCAGGAC |
| | (pos4) | ATTCCATCTT | AUUCCAucuu |
| | Exon 15 SA | CCATTCTAGG | CCAUUCUAGG |
| | (pos6) | AACAAAATAT | AACAAAAUAU |
| Cblb | Exon 1 STOP | GAGCTTCCAA | GAGCUUCCAA |
| | | GTCTTCTCCA | GUCUUCUCCA |
| | Exon 1 STOP | TCCCCGAAAA | UCCCCGAAAA |
| | (JMG44) | GGTCGAATTT | GGUCGAAUUU |
| | Exon 2 STOP | ATGAAGAACA | AUGAAGAACA |
| | | GTCACAGGAC | GUCACAGGAC |
| | Exon 3 SA | GATTTCGTCT | GAUUUCGUCU |
| | | GTAGGCACAA | GUAGGCACAA |
| | Exon 4 SD | TAAACTTACC | UAAACUUACC |
| | | TGAAACAGCC | UGAAACAGCC |
| | Exon 4 STOP | ATTCAGACAG | AUUCAGACAG |
| | | TGCCTTCATG | UGCCUUCAUG |
| | Exon 6 STOP | GTTGCACTCG | GUUGCACUCG |
| | | ATTGGGACAG | AUUGGGACAG |
| | Exon 6 STOP | TTATTTCAAG | UUAUUUCAAG |
| | | CCCTGATTGA | CCCUGAUUGA |
| | Exon 7 SD | TTACCTGTGT | UUACCUGUGU |
| | | AACTTTTATA | AACUUUUAUA |
| | Exon 8 SA | ATTGTTCCTG | AUUGUUCCUG |
| | (pos8) | GAATTTGGGG | GAAUUUGGGG |
| | Exon 8 SD | ATTATACCTG | AUUAUACCUG |
| | (JMG48) | CCATGCCGTA | CCAUGCCGUA |
| | Exon 8 SA | GTTCCTGGAA | GUUCCUGGAA |
| | (pos 5) | TTTGGGGAGG | UUUGGGGAGG |
| | (JMG46) | | |
| | Exon 8 STOP | CTGCCATGCC | CUGCCAUGCC |
| | (JMG47) | GTAAGGCAAG | GUAAGGCAAG |
| | Exon 10 SD | TCTACCTTTG | UCUACCUUUG |
| | (JMG49) | GTGAACCCGT | GUGAACCCGU |
| | Exon 11 SD | CTTACCTTAG | CUUACCUUAG |
| | (JMG50) | CTCCTTCTAA | CUCCUUCUAA |
| | Exon 11 STOP | GGGATGTCGA | GGGAUGUCGA |
| | | CTCCTAGGGG | CUCCUAGGGG |
| | Exon 11 STOP | CGAGGGCACC | CGAGGGCACC |
| | | ATGCTTCAAG | AUGCUUCAAG |
| | Exon 12 SD | AAACTCACTT | AAACUCACUU |
| | | TATGCTAGGG | UAUGCUAGGG |
| | Exon 12 SD | CTCACTTTAT | CUCACUUUAU |
| | (JMG51) | GCTAGGGAGG | GCUAGGGAGG |
| | Exon 16 SA | CTTCACCTGC | CUUCACCUGC |
| | (JMG52) | ATTTAAAGAA | AUUUAAAGAA |
| | Exon 4 STOP | CCACCAGATT | CCACCAGAUU |
| | (JMG45) | AGCTCTGGCC | AGCUCUGGCC |
| | Exon 10 SD | CTACCTTTGG | CUACCUUUGG |
| | (pos4) | TGAACCCGTT | UGAACCCGUU |
| BTLA | Exon 1 STOP | ATGTTCCAGA | AUGUUCCAGA |
| | (pos6) | TGTCCAGATA | UGUCCAGAUA |
| | Exon 1 STOP | TGTTCCAGAT | UGUUCCAGAU |
| | (pos5) | GTCCAGATAT | GUCCAGAUAU |
| | Exon 2 STOP | AGATAGACAA | AGAUAGACAA |
| | (pos8) | ACAAGTTGGA | ACAAGUUGGA |
| | Exon 2 STOP | AGCTTGCACC | AGCUUGCACC |
| | (pos9) | AAGTCACATG | AAGUCACAUG |
| | Exon 3 SD | ACCCACCTTG | ACCCACCUUG |
| | (pos6) | GTGCCTTCTC | GUGCCUUCUC |
| B2M | Exon 1 SD | ACTCACGCTG | ACUCACGCUG |
| (BE) | | GATAGCCTCC | GAUAGCCUCC |
| | Exon 2 SA | TGGAGTACCT | UGGAGUACCU |
| | (pos9) | GAGGAATATC | GAGGAAUAUC |
| | Exon 2 STOP | TTACCCCACT | UUACCCCACU |
| | (pos6) | TAACTATCTT | UAACUAUCUU |
| | Exon 3 SA | TCGATCTATG | UCGAUCUAUG |
| | | AAAAAGACAG | AAAAAGACAG |
| | Exon 2 STOP | TACCCCACTT | UACCCCACUU |
| | | AACTATCT | AACUAUCU |
| B2M | Exon 1 SD 1 | ACTCACGCTG | ACUCACGCUG |
| (ABE) | (pos 5) | GATAGCCTCC | GAUAGCCUCC |
| | Exon 2 SA | CTCAGGTACT | CUCAGGUACU |
| | (pos 4) | CCAAAGATTC | CCAAAGAUUC |
| | Exon 2 SD | CTTACCCCAC | CUUACCCCAC |
| | (pos 4) | TTAACTATCT | UUAACUAUCU |
| TET2 | Exon 1 STOP 1 | CATTTGCCAG | CAUUUGCCAG |
| | (pos 8) | ACAGAACCTC | ACAGAACCUC |
| | Exon 1 STOP 2 | AAACAAGACC | AAACAAGACC |
| | (pos 4) | AAAAGGCTAA | AAAAGGCUAA |
| | Exon 1 STOP 3 | GTAAGCCAAG | GUAAGCCAAG |
| | (pos 7) | AAAGAAATCC | AAAGAAAUCC |
| | Exon 1 STOP 4 | GCTTCAGATT | GCUUCAGAUU |
| | (pos 5) | CTGAATGAGC | CUGAAUGAGC |
| | Exon 1 STOP 5 | TTAAAACAAA | UUAAAACAAA |
| | (pos 7) | ATGAAATGAA | AUGAAAUGAA |
| | Exon 1 STOP 6 | GTTCCTCAGC | GUUCCUCAGC |
| | (pos 7) | TTCCTTCAGA | UUCCUUCAGA |
| | Exon 1 STOP 7 | CAAAGAGCAA | CAAAGAGCAA |
| | (pos 8) | GAGATTCTGA | GAGAUUCUGA |
| | Exon 1 STOP 8 | AAAGAGCAAG | AAAGAGCAAG |
| | (pos 7) | AGATTCTGAA | AGAUUCUGAA |
| | Exon 1 STOP 9 | ACACAGCACT | ACACAGCACU |
| | (pos 4) | ATCTGAAACC | AUCUGAAACC |
| | Exon 1 STOP 10 | CACCCAGAAA | CACCCAGAAA |
| | (pos | ACAACACAGC | ACAACACAGC |
| | 5) | | |
| | Exon 16 SA | CTTCACCTGC | CUUCACCUGC |
| | (JMG52) | ATTTAAAGAA | AUUUAAAGAA |
| | Exon 4 | CCACCAGATT | CCACCAGAUU |
| | STOP | AGCTCTGGCC | AGCUCUGGCC |
| | (JMG45) | | |
| | Exon 10 SD | CTACCTTTGG | CUACCUUUGG |
| | (pos4) | TGAACCCGTT | UGAACCCGUU |
| BTLA | Exon 1 | ATGTTCCAGA | AUGUUCCAGA |
| | STOP | TGTCCAGATA | UGUCCAGAUA |
| | (pos6) | | |
| | Exon 1 | TGTTCCAGAT | UGUUCCAGAU |
| | STOP | GTCCAGATAT | GUCCAGAUAU |
| | (pos5) | | |
| | Exon 2 | AGATAGACAA | AGAUAGACAA |
| | STOP | ACAAGTTGGA | ACAAGUUGGA |
| | (pos8) | | |
| | Exon 2 | AGCTTGCACC | AGCUUGCACC |
| | STOP | AAGTCACATG | AAGUCACAUG |
| | (pos9) | | |
| | Exon 3 SD | ACCCACCTTG | ACCCACCUUG |
| | (pos6) | GTGCCTTCTC | GUGCCUUCUC |
| B2M | Exon 1 SD | ACTCACGCTG | ACUCACGCUG |
| (BE) | | GATAGCCTCC | GAUAGCCUCC |
| | Exon 2 SA | TGGAGTACCT | UGGAGUACCU |
| | (pos9) | GAGGAATATC | GAGGAAUAUC |
| | Exon 2 | TTACCCCACT | UUACCCCACU |
| | STOP | TAACTATCTT | UAACUAUCUU |
| | (pos6) | | |
| | Exon 3 SA | TCGATCTATG | UCGAUCUAUG |
| | | AAAAAGACAG | AAAAAGACAG |
| | Exon 2 | TACCCCACTT | UACCCCACUU |
| | STOP | AACTATCT | AACUAUCU |
| B2M | Exon 1 SD 1 | ACTCACGCTG | ACUCACGCUG |
| (ABE) | (pos 5) | GATAGCCTCC | GAUAGCCUCC |
| | Exon 2 SA | CTCAGGTACT | CUCAGGUACU |
| | (pos 4) | CCAAAGATTC | CCAAAGAUUC |
| | Exon 2 SD | CTTACCCCAC | CUUACCCCAC |
| | (pos 4) | TTAACTATCT | UUAACUAUCU |
| TET2 | Exon 1 | CATTTGCCAG | CAUUUGCCAG |
| | STOP 1 | ACAGAACCTC | ACAGAACCUC |
| | (pos 8) | | |
| | Exon 1 | AAACAAGACC | AAACAAGACC |
| | STOP 2 | AAAAGGCTAA | AAAAGGCUAA |
| | (pos 4) | | |
| | Exon 1 | GTAAGCCAAG | GUAAGCCAAG |
| | STOP 3 | AAAGAAATCC | AAAGAAAUCC |
| | (pos 7) | | |
| | Exon 1 | GCTTCAGATT | GCUUCAGAUU |
| | STOP 4 | CTGAATGAGC | CUGAAUGAGC |
| | (pos 5) | | |
| | Exon 1 | TTAAAACAAA | UUAAAACAAA |
| | STOP 5 | ATGAAATGAA | AUGAAAUGAA |
| | (pos 7) | | |
| | Exon 1 | GTTCCTCAGC | GUUCCUCAGC |
| | STOP 6 | TTCCTTCAGA | UUCCUUCAGA |
| | (pos 7) | | |
| | Exon 1 | CAAAGAGCAA | CAAAGAGCAA |
| | STOP 7 | GAGATTCTGA | GAGAUUCUGA |
| | (pos 8) | | |
| | Exon 1 | AAAGAGCAAG | AAAGAGCAAG |
| | STOP 8 | AGATTCTGAA | AGAUUCUGAA |
| | (pos 7) | | |
| | Exon 1 | ACACAGCACT | ACACAGCACU |
| | STOP 9 | ATCTGAAACC | AUCUGAAACC |
| | (pos 4) | | |
| | Exon 1 | CACCCAGAAA | CACCCAGAAA |
| | STOP 10 | ACAACACAGC | ACAACACAGC |
| | (pos 5) | | |
| | Exon 1 | TACCAAGTTG | UACCAAGUUG |
| | STOP 11 | AAATGAATCA | AAAUGAAUCA |
| | (pos 4) | | |
| | Exon 1 | ATGAATCAAG | AUGAAUCAAG |
| | STOP 12 | GGCAGTCCCA | GGCAGUCCCA |
| | (pos 7) | | |
| | Exon 1 | AGGGCAGTCC | AGGGCAGUCC |
| | STOP 13 | CAAGGTACAG | CAAGGUACAG |
| | (pos 5) | | |
| | Exon 1 | GTTCCAAAAA | GUUCCAAAAA |
| | STOP 14 | CCCTCACACC | CCCUCACACC |
| | (pos 5) | | |
| | Exon 1 | GAAACAGCAC | GAAACAGCAC |
| | STOP 15 | TTGAATCAAC | UUGAAUCAAC |
| | (pos 5) | | |
| | Exon 1 | ATTACAAATA | AUUACAAAUA |
| | STOP 16 | AAGAATAAAG | AAGAAUAAAG |
| | (pos 5) | | |
| | Exon 1 | TAATGTCCAA | UAAUGUCCAA |
| | STOP 17 | ATGGGACTGG | AUGGGACUGG |
| | (pos 8) | | |
| | Exon 1 | CAAAGCAAGA | CAAAGCAAGA |
| | STOP 18 | TCTTCTTCAC | UCUUCUUCAC |
| | (pos 6) | | |
| | Exon 1 | ACAACAAGCT | ACAACAAGCU |
| | STOP 19 | TCAGTTCTAC | UCAGUUCUAC |
| | (pos 5) | | |
| | Exon 1 | CTGCGCAACT | CUGCGCAACU |
| | STOP 20 | TGCTCAGCAA | UGCUCAGCAA |
| | (pos 6) | | |
| | Exon 1 | CACTCAGACC | CACUCAGACC |
| | STOP 21 | CCTCCCCAGA | CCUCCCCAGA |
| | (pos 5) | | |
| | Exon 1 | TTTTTCCATG | UUUUUCCAUG |
| | STOP 22 | TTTTGTTTTC | UUUUGUUUUC |
| | (pos 6) | | |
| | Exon 1 SD | TTACCTACAC | UUACCUACAC |
| | (pos 4) | ATCTGCAAGA | AUCUGCAAGA |
| | Exon 3 SD | ACACTTACCC | ACACUUACCC |
| | (pos 8) | ACTTAGCAAT | ACUUAGCAAU |
| | Exon 7 | CATGCAGAAT | CAUGCAGAAU |
| | STOP | GGCAGCACAT | GGCAGCACAU |
| | (pos 5) | | |
| | Exon 8 | AAGCTCAGGA | AAGCUCAGGA |
| | STOP 1 | GGAGAAAAAA | GGAGAAAAAA |
| | (pos 6) | | |
| | Exon 8 | CGCAAGCCAG | CGCAAGCCAG |
| | STOP 2 | GCTAAACAGT | GCUAAACAGU |
| | (pos 8) | | |
| | Exon 9 | TTCTCCOCAG | UUCUCCCCAG |
| | STOP 1 | TCTCAGCCGA | UCUCAGCCGA |
| | (pos 8) | | |
| | Exon 9 | TGGTCAGGAA | UGGUCAGGAA |
| | STOP 2 | AAGCAGCCAT | AAGCAGCCAU |
| | (pos 5) | | |
| | Exon 9 | CTAGTCCAGG | CUAGUCCAGG |
| | STOP 3 | GTGTGGCTTC | GUGUGGCUUC |
| | (pos 7) | | |
| Spry1 | Exon 1 | CCCCAAAATC | CCCCAAAAUC |
| | STOP 1 | AACATGGCAG | AACAUGGCAG |
| | Exon 1 | TGTGATCCAG | UGUGAUCCAG |
| | STOP 2 | CAGCCTTCTT | CAGCCUUCUU |
| | Exon 1 | GACCAGATCA | GACCAGAUCA |
| | STOP 3 | AGGCCATAAG | AGGCCAUAAG |
| | Exon 1 | CAAGACAAGA | CAAGACAAGA |
| | STOP 4 | AAAGCATGAA | AAAGCAUGAA |
| | Exon 1 | CTGAACAGGG | CUGAACAGGG |
| | STOP 5 | ACTGTTAGGA | ACUGUUAGGA |
| Spry2 | Exon 1 | CCAGAGCTCA | CCAGAGCUCA |
| | STOP 1 | GAGTGGCAAC | GAGUGGCAAC |
| | Exon 1 | TTGCTGCAGA | UUGCUGCAGA |
| | STOP 2 | CGCCCCGTGA | CGCCCCGUGA |
| | Exon 1 | CTGCAGACGC | CUGCAGACGC |
| | STOP 3 | CCCGTGACGG | CCCGUGACGG |
| | Exon 1 | CGACAAGCAG | CGACAAGCAG |
| | STOP 4 | TGCCTTTGCT | UGCCUUUGCU |
| | Exon 1 | GCCCAGAACG | GCCCAGAACG |
| | STOP 5 | TGATTGACTA | UGAUUGACUA |
| | Exon 1 | TGTGCCAGGG | UGUGCCAGGG |
| | STOP 6 | GTGTTATGAC | GUGUUAUGAC |
| | Exon 1 | CAGATCCAGT | CAGAUCCAGU |
| | STOP 7 | CTGATGGCAG | CUGAUGGCAG |
| | Exon 1 | TGTACACGAT | UGUACACGAU |
| | STOP 8 | GGTCAGCCAT | GGUCAGCCAU |
| CIITA | Exon 1 SD | TTTTACCTTG | UUUUACCUUG |
| | (pos 6) | GGGCTCTGAC | GGGCUCUGAC |
| | Exon 1 | AGCCCCAAGG | AGCCCCAAGG |
| | STOP 1 | TAAAAAGGCC | UAAAAAGGCC |
| | (pos 6) | | |
| | Exon 1 | GAGCCCCAAG | GAGCCCCAAG |
| | STOP 2 | GTAAAAAGGC | GUAAAAAGGC |
| | (pos 7) | | |
| | Exon 2 | CAGCTCACAG | CAGCUCACAG |
| | STOP 1 | TGTGCCACCA | UGUGCCACCA |
| | (pos 8) | | |
| | Exon 2 | TATGACCAGA | UAUGACCAGA |
| | STOP 2 | TGGACCTGGC | UGGACCUGGC |
| | (pos 7) | | |
| | Exon 4 | ACTGGACCAG | ACUGGACCAG |
| | STOP 1 | TATGTCTTCC | UAUGUCUUCC |
| | (pos 8) | | |
| | Exon 4 | TGTCTTCCAG | UGUCUUCCAG |
| | STOP 2 | GACTCCCAGC | GACUCCCAGC |
| | (pos 8) | | |
| | Exon 7 | TTCAACCAGG | UUCAACCAGG |
| | STOP 1 | AGCCAGCCTC | AGCCAGCCUC |
| | (pos 7) | | |
| | Exon 7 | GACCAGATTC | GACCAGAUUC |
| | STOP 2 | CCAGTATGTT | CCAGUAUGUU |
| | (pos 4) | | |
| | Exon 7 SD | TAACATACTG | UAACAUACUG |
| | (pos 8) | GGAATCTGGT | GGAAUCUGGU |
| | Exon 8 SA | AAAGGCACTG | AAAGGCACUG |
| | (pos 8) | CAAGAGACAA | CAAGAGACAA |
| | Exon 8 | CTCTGGCAAA | CUCUGGCAAA |
| | STOP | TCTCTGAGGC | UCUCUGAGGC |
| | (pos 8) | | |
| | Exon 9 | AGCCAAGTAC | AGCCAAGUAC |
| | STOP 1 | CCCCTCCCAG | CCCCUCCCAG |
| | (pos 4) | | |
| | Exon 9 | ACCTCCCGAG | ACCUCCCGAG |
| | STOP 2 | CAAACATGAC | CAAACAUGAC |
| | (pos 7) | | |
| | Exon 9 SD | CCTTACCTGT | CCUUACCUGU |
| | (pos 6) | CATGTTTGCT | CAUGUUUGCU |
| | Exon 10 SA | TGCTCTGGAG | UGCUCUGGAG |
| | (pos 5) | ATGGAGAAGC | AUGGAGAAGC |
| | Exon 10 | CCCACCCAAT | CCCACCCAAU |
| | STOP 1 | GCCCGGCAGC | GCCCGGCAGC |
| | (pos 7) | | |
| | Exon 10 | AGGCCATTTT | AGGCCAUUUU |
| | STOP 2 | GGAAGCTTGT | GGAAGCUUGU |
| | (pos 4) | | |
| | Exon 11 SA | ACCGGCTCTG | ACCGGCUCUG |
| | (pos 8) | CAAAGGCCAG | CAAAGGCCAG |
| | Exon 11 | TGGTGCAGGC | UGGUGCAGGC |
| | STOP 1 | CAGGCTGGAG | CAGGCUGGAG |
| | (pos 6) | | |
| | Exon 11 | GAACGGCAGC | GAACGGCAGC |
| | STOP 3 | TGGCCCAAGG | UGGCCCAAGG |
| | (pos 7) | | |
| | Exon 11 | GGCCCAAGGA | GGCCCAAGGA |
| | STOP 4 | GGCCTGGCTG | GGCCUGGCUG |
| | (pos 5) | | |
| | Exon 11 | GACACGAGTG | GACACGAGUG |
| | STOP 5 | ATTGCTGTGC | AUUGCUGUGC |
| | (pos 5) | | |
| | Exon 11 | CTGGTCAGGG | CUGGUCAGGG |
| | STOP 5 | CAAGAGCTAT | CAAGAGCUAU |
| | (pos 6) | | |
| | Exon 11 | GGGCCCACAG | GGGCCCACAG |
| | STOP 5 | CCACTCGTGG | CCACUCGUGG |
| | (pos 8) | | |
| | Exon 11 | TTCCAGAAGA | UUCCAGAAGA |
| | STOP 6 | AGCTGCTCCG | AGCUGCUCCG |
| | (pos 4) | | |
| | Exon 11 | CCTGGTCCAG | CCUGGUCCAG |
| | STOP 7 | AGCCTGAGCA | AGCCUGAGCA |
| | (pos 8) | | |
| | Exon 11 | CAGACATCAA | CAGACAUCAA |
| | STOP 8 | AGTACCCTAC | AGUACCCUAC |
| | (pos 8) | | |
| | Exon 11 | ACATCAAAGT | ACAUCAAAGU |
| | STOP 9 | ACCCTACAGG | ACCCUACAGG |
| | (pos 5) | | |
| | Exon 11 | CGCCCAGGTC | CGCCCAGGUC |
| | STOP 10 | CTCACGTCTG | CUCACGUCUG |
| | (pos 4) | | |
| | Exon 11 | CTTAGTCCAA | CUUAGUCCAA |
| | STOP 11 | CACCCACCGC | CACCCACCGC |
| | (pos 8) | | |
| | Exon 11 | CCTCCTGCAA | CCUCCUGCAA |
| | STOP 12 | TGCTTCCTGG | UGCUUCCUGG |
| | (pos 8) | | |
| | Exon 11 | GAGCCAGCCA | GAGCCAGCCA |
| | STOP 13 | CAGGGCCCCC | CAGGGCCCCC |
| | (pos 8) | | |
| | Exon 11 | GGAAGCAGAA | GGAAGCAGAA |
| | STOP 14 | GGTGCTTGCG | GGUGCUUGCG |
| | (pos 6) | | |
| | Exon 11 | GGCTGCAGCC | GGCUGCAGCC |
| | STOP 15 | GGGGACACTG | GGGGACACUG |
| | (pos 6) | | |
| | Exon 11 | CTGCCAAATT | CUGCCAAAUU |
| | STOP 16 | CCAGCCTCCT | CCAGCCUCCU |
| | (pos 4) | | |
| | Exon 11 | GGCGGGCCAA | GGCGGGCCAA |
| | STOP 17 | GACTTCTCCC | GACUUCUCCC |
| | (pos 8) | | |
| | Exon 12 | AGACTCAGAG | AGACUCAGAG |
| | STOP 1 | GTGAGAGGAG | GUGAGAGGAG |
| | (pos 6) | | |
| | Exon 14 SA | AGCCTAGGAG | AGCCUAGGAG |
| | (pos 4) | GCAAAGAGCA | GCAAAGAGCA |
| | Exon 14 | CCCCCAGGCT | CCCCCAGGCU |
| | STOP 1 | TTCCCCAAAC | UUCCCCAAAC |
| | (pos 5) | | |
| | Exon 14 SD | TCACTCCAGA | UCACUCCAGA |
| | (pos 4) | TGCTGCAGGG | UGCUGCAGGG |
| | Exon 15 SA | AGGCTGCAGG | AGGCUGCAGG |
| | (pos 4) | TGGAATCAGA | UGGAAUCAGA |
| | Exon 15 | CTTCCCCCAG | CUUCCCCCAG |
| | STOP 1 | CTGAAGTCCT | CUGAAGUCCU |
| | (pos 8) | | |
| | Exon 15 SD | CACTCACTTG | CACUCACUUG |
| | (pos 7) | AGGGTTTCCA | AGGGUUUCCA |
| | Exon 16 SA | CAGACTGCGG | CAGACUGCGG |
| | (pos 5) | GGACACAGTG | GGACACAGUG |
| | Exon 16 SD 1 | CCACTCACCT | CCACUCACCU |
| | (pos 8) | TAGCCTGAGC | UAGCCUGAGC |
| | Exon 16 SD 2 | CACTCACCTT | CACUCACCUU |
| | (pos 7) | AGCCTGAGCA | AGCCUGAGCA |
| | Exon 17 SA | GTACAAGCTG | GUACAAGCUG |
| | (pos 8) | TCGGAAACAG | UCGGAAACAG |
| | Exon 17 SD 1 | ACACTCACTC | ACACUCACUC |
| | (pos 8) | CATCACCCGG | CAUCACCCGG |
| | Exon 17 SD 2 | CACTCACTCC | CACUCACUCC |
| | (pos 7) | ATCACCCGGA | AUCACCCGGA |
| | Exon 18 | CGTCCAGTAC | CGUCCAGUAC |
| | STOP | AACAAGTTCA | AACAAGUUCA |
| | (pos 5) | | |
| | Exon 19 SA 1 | CCACATCCTG | CCACAUCCUG |
| | (pos 8) | CAAGGGGGGA | CAAGGGGGGA |
| | Exon 19 SA 2 | CACATCCTGC | CACAUCCUGC |
| | (pos 7) | AAGGGGGGAT | AAGGGGGGAU |
| | Exon 19 | TGGGCGTCCA | UGGGCGUCCA |
| | STOP 1 | CATCCTGCAA | CAUCCUGCAA |
| | (pos 8) | | |
| | Exon 19 | GGGCGTCCAC | GGGCGUCCAC |
| | STOP 2 | ATCCTGCAAG | AUCCUGCAAG |
| | (pos 9) | | |
| | Exon 19 | GGCGTCCACA | GGCGUCCACA |
| | STOP 3 | TCCTGCAAGG | UCCUGCAAGG |
| | (pos 6) | | |
| | Exon 19 | GCGTCCACAT | GCGUCCACAU |
| | STOP 4 | CCTGCAAGGG | CCUGCAAGGG |
| | (pos 5) | | |
| CD7 | Exon 1 | GCCCAAGGTA | GCCCAAGGUA |
| | STOP | AGAGCTTCCC | AGAGCUUCCC |
| | (pos 4) | | |
| | Exon 1 SD 1 | GCTCTTACCT | GCUCUUACCU |
| | (pos 8) | TGGGCAGCCA | UGGGCAGCCA |
| | Exon 1 SD 2 | AGCTCTTACC | AGCUCUUACC |
| | (pos 9) | TTGGGCAGCC | UUGGGCAGCC |
| | Exon 2 SA 1 | TGCACCTCTG | UGCACCUCUG |
| | (pos 8) | GGGAGGACCT | GGGAGGACCU |
| | Exon 2 SA 2 | CTGCACCTCT | CUGCACCUCU |
| | (pos 9) | GGGGAGGACC | GGGGAGGACC |
| | Exon 2 | CGCCTGCAGC | CGCCUGCAGC |
| | STOP 1 | TGTCGGACAC | UGUCGGACAC |
| | (pos 7) | | |
| | Exon 2 | CACCTGCCAG | CACCUGCCAG |
| | STOP 2 | GCCATCACGG | GCCAUCACGG |
| | (pos 8) | | |
| | Exon 2 SD 1 | CCCTACCTGT | CCCUACCUGU |
| | (pos 6) | CACCAGGACC | CACCAGGACC |
| | Exon 2 SD 2 | CCTACCTGTC | CCUACCUGUC |
| | (pos 5) | ACCAGGACCA | ACCAGGACCA |
| | Exon 3 SA | CCTCTGAGAA | CCUCUGAGAA |
| | (pos 4) | GGAAAAAAGA | GGAAAAAAGA |
| | Exon 3 | CAGAGGAACA | CAGAGGAACA |
| | STOP 1 | GTCCCAAGGA | GUCCCAAGGA |
| | (pos9) | | |
| CD33 | Exon 1 SD 1 | CACTCACCTG | CACUCACCUG |
| | (pos 7) | CCCACAGCAG | CCCACAGCAG |
| | Exon 1 SD 2 | CCACTCACCT | CCACUCACCU |
| | (pos 8) | GCCCACAGCA | GCCCACAGCA |
| | Exon 1 SD | GCCACTCACC | GCCACUCACC |
| | (pos 9) | TGCCCACAGC | UGCCCACAGC |
| | Exon 2 SA 1 | AGGGCCCCTG | AGGGCCCCUG |
| | (pos 8) | TGGGGAAACG | UGGGGAAACG |
| | Exon 2 SA 2 | GGGCCCCTGT | GGGCCCCUGU |
| | (pos 7) | GGGGAAACGA | GGGGAAACGA |
| | Exon 2 | GCAAGTGCAG | GCAAGUGCAG |
| | STOP 1 | GAGTCAGTGA | GAGUCAGUGA |
| | (pos 8) | | |
| | Exon 2 | CGGAACCAGT | CGGAACCAGU |
| | STOP 2 | AACCATGAAC | AACCAUGAAC |
| | (pos 6) | | |
| | Exon 2 | GGAACCAGTA | GGAACCAGUA |
| | STOP 3 | ACCATGAACT | ACCAUGAACU |
| | (pos 5) | | |
| | Exon 2 | GAACCAGTAA | GAACCAGUAA |
| | STOP 4 | CCATGAACTG | CCAUGAACUG |
| | (pos 4) | | |
| | Exon 2 | GCTAGATCAA | GCUAGAUCAA |
| | STOP 5 | GAAGTACAGG | GAAGUACAGG |
| | (pos 8) | | |
| | Exon 2 | AGAAGTACAG | AGAAGUACAG |
| | STOP 6 | GAGGAGACTC | GAGGAGACUC |
| | (pos 8) | | |
| | Exon 3 SA 1 | CAAGTCTAGT | CAAGUCUAGU |
| | (pos 6) | GAGGAGAAAG | GAGGAGAAAG |
| | Exon 3 SA 2 | AAGTCTAGTG | AAGUCUAGUG |
| | (pos 5) | AGGAGAAAGA | AGGAGAAAGA |
| | Exon 3 SA 3 | AGTCTAGTGA | AGUCUAGUGA |
| | (pos 4) | GGAGAAAGAG | GGAGAAAGAG |
| | Exon 3 | ACAGGCCCAG | ACAGGCCCAG |
| | STOP 1 | GACACAGAGC | GACACAGAGC |
| | (pos 7) | | |
| | Exon 3 | ACCTGTCAGG | ACCUGUCAGG |
| | STOP 2 | TGAAGTTCGC | UGAAGUUCGC |
| | (pos 7) | | |
| | Exon 3 SD 1 | ACTTACAGGT | ACUUACAGGU |
| | (pos 6) | GACGTTGAGC | GACGUUGAGC |
| | Exon 4 SA 1 | AACATCTAGG | AACAUCUAGG |
| | (pos 6) | AGAGGAAGAG | AGAGGAAGAG |
| | Exon 4 | GTTCCACAGA | GUUCCACAGA |
| | STOP 1 | ACCCAACAAC | ACCCAACAAC |
| | (pos 7) | | |
| | Exon 4 SD 1 | TTCCTACCTG | UUCCUACCUG |
| | (pos 7) | AGCCATCTCC | AGCCAUCUCC |
| | Exon 5 SD | ATGCTCACAT | AUGCUCACAU |
| | (pos 8) | GAAGAAGATG | GAAGAAGAUG |
| | Exon 5 | GGGAAACAAG | GGGAAACAAG |
| | STOP 1 | AGACCAGAGC | AGACCAGAGC |
| | (pos 7) | | |
| | Exon 6 SA 1 | TCACTCTGAT | UCACUCUGAU |
| | (pos 6) | GGGAGACACC | GGGAGACACC |
| | Exon 6 SA 2 | CACTCTGATG | CACUCUGAUG |
| | (pos 5) | GGAGACACCA | GGAGACACCA |
| | Exon 6 SA 1 | TTTCTTATGG | UUUCUUAUGG |
| | (pos 4) | AGAGGAAAGA | AGAGGAAAGA |
| CD52 | Exon 1 | GTACAGGTAA | GUACAGGUAA |
| | STOP | GAGCAACGCC | GAGCAACGCC |
| | (pos 4) | | |
| | Exon 1 SD | CTCTTACCTG | CUCUUACCUG |
| | (pos7) | TACCATAACC | UACCAUAACC |
| | Exon 1 SD | TTACCTGTAC | UUACCUGUAC |
| | (pos 4) | CATAACCAGG | CAUAACCAGG |
| | Exon 2 SA | TGTATCTGTA | UGUAUCUGUA |
| | (pos 6) | GGAGGAGAAG | GGAGGAGAAG |
| | Exon 2 SA | GTATCTGTAG | GUAUCUGUAG |
| | (pos 5) | GAGGAGAAGT | GAGGAGAAGU |
| | Exon 2 | CAGATACAAA | CAGAUACAAA |
| | STOP | CTGGACTCTC | CUGGACUCUC |
| | (pos 7) | | |
| CD123 | Exon 1 SD | TCTTACCTTC | UCUUACCUUC |
| | (pos 6) | CTTCGTTTGC | CUUCGUUUGC |
| | Exon 2 SA 1 | TTTGGATCTA | UUUGGAUCUA |
| | (pos 8) | AAACGGTGAC | AAACGGUGAC |
| | Exon 2 SA 2 | GATCTAAAAC | GAUCUAAAAC |
| | (pos 4) | GGTGACAGGT | GGUGACAGGU |
| | Exon 2 | AAAGGCTCAG | AAAGGCUCAG |
| | STOP 1 | CAGTTGACCT | CAGUUGACCU |
| | (pos 8) | | |
| | Exon 2 SD | ATTTACCGGC | AUUUACCGGC |
| | (pos 6) | ATAGAATAGT | AUAGAAUAGU |
| | Exon 3 SA | TCACTGCCTA | UCACUGCCUA |
| | (pos 8) | AGAGAGACAT | AGAGAGACAU |
| | Exon 3 | AGGATCCACG | AGGAUCCACG |
| | STOP 1 | TGGAGAATGG | UGGAGAAUGG |
| | (pos 6) | | |
| | Exon 3 | GGATCCACGT | GGAUCCACGU |
| | STOP 2 | GGAGAATGGT | GGAGAAUGGU |
| | (pos 5) | | |
| | Exon 3 SD | TCTCACTGTT | UCUCACUGUU |
| | (pos 6) | CTCAGGGAAG | CUCAGGGAAG |
| | Exon 4 | CCTGCCCAAG | CCUGCCCAAG |
| | STOP 1 | GCTTCCCACC | GCUUCCCACC |
| | (pos 6) | | |
| | Exon 4 | CTGCCCAAGG | CUGCCCAAGG |
| | STOP 2 | CTTCCCACCT | CUUCCCACCU |
| | (pos 5) | | |
| | Exon 5 SA 1 | GCCTGCTGCG | GCCUGCUGCG |
| | (pos 6) | GTAAGCGGTA | GUAAGCGGUA |
| | Exon 5 | GATGCTCAGG | GAUGCUCAGG |
| | STOP 1 | GAACACGTAT | GAACACGUAU |
| | (pos 7) | | |
| | Exon 5 | TTCTCAAAGT | UUCUCAAAGU |
| | STOP 2 | TCCCACATCC | UCCCACAUCC |
| | (pos 5) | | |
| | Exon 5 | TCACAGATTG | UCACAGAUUG |
| | STOP 3 | GTGAGTAGCC | GUGAGUAGCC |
| | (pos 4) | | |
| | Exon 7 SD | CTCACCTGTT | CUCACCUGUU |
| | (pos 5) | CTGTGATTAC | CUGUGAUUAC |
| | Exon 8 | TCCTTCCAGC | UCCUUCCAGC |
| | STOP 1 | TACTCAATCC | UACUCAAUCC |
| | (pos 7) | | |
| | Exon 8 | CACAGTACAA | CACAGUACAA |
| | STOP 2 | ATAAGAGCCC | AUAAGAGCCC |
| | (pos 8) | | |
| | Exon 8 | CCCCCCAGCG | CCCCCCAGCG |
| | STOP 3 | CTTCGGTGAG | CUUCGGUGAG |
| | (pos 6) | | |
| | Exon 8 | CCCCCAGCGC | CCCCCAGCGC |
| | STOP 4 | TTCGGTGAGT | UUCGGUGAGU |
| | (pos 5) | | |
| | Exon 8 SD | CCACTCACCG | CCACUCACCG |
| | (pos 8) | AAGCGCTGGG | AAGCGCUGGG |
| | Exon 10 SA | TACCTCGGAG | UACCUCGGAG |
| | (pos 4) | GAAAGAGAAA | GAAAGAGAAA |
| | Exon 10 | CAGCTTCCAA | CAGCUUCCAA |
| | STOP | AACGACAAGC | AACGACAAGC |
| | (pos 8) | | |
| | Exon 10 SD | AACATACCAG | AACAUACCAG |
| | (pos 7) | CTTGTCGTTT | CUUGUCGUUU |
| | Exon 11 SA 1 | AGACCACCTG | AGACCACCUG |
| | (pos 8) | CAGAGAGGAG | CAGAGACGAG |
| | Exon 11 SA 2 | CCACCTGCAG | CCACCUGCAG |
| | (pos 5) | AGACGAGAGG | AGACGAGAGG |
| TRBC1 | Exon 1 | CCACACCCAA | CCACACCCAA |
| | STOP 1 | AAGGCCACAC | AAGGCCACAC |
| | (pos 8) | | |
| | Exon 1 | CCCACCAGCT | CCCACCAGCU |
| | STOP 2 | CAGCTCCACG | CAGCUCCACG |
| | (pos 5) | | |
| | Exon 1 | CGCTGTCAAG | CGCUGUCAAG |
| | STOP 3 | TCCAGTTCTA | UCCAGUUCUA |
| | (pos 7) | | |
| | Exon 1 | GCTGTCAAGT | GCUGUCAAGU |
| | STOP 4 | CCAGTTCTAC | CCAGUUCUAC |
| | (pos 6) | | |
| | Exon 1 | CACCCAGATC | CACCCAGAUC |
| | STOP 5 | GTCAGCGCCG | GUCAGCGCCG |
| | (pos 5) | | |
| | Exon 1 SD | CCACTCACCT | CCACUCACCU |
| | (pos 8) | GCTCTACCCC | GCUCUACCCC |
| | Exon 2 SA | CCACAGTCTG | CCACAGUCUG |
| | (pos 8) | AAAGAAAGCA | AAAGAAAGCA |
| | Exon 3 SA | GACACTGTTG | GACACUGUUG |
| | (pos 5) | GCACGGAGGA | GCACGGAGGA |
| | Exon 3 SD | TTACCATGGC | UUACCAUGGC |
| | (pos 4) | CATCAACACA | CAUCAACACA |
| TRBC2 | Exon 1 | CCACACCCAA | CCACACCCAA |
| | STOP 1 | AAGGCCACAC | AAGGCCACAC |
| | (pos 8) | | |
| | Exon 1 | CCCACCAGCT | CCCACCAGCU |
| | STOP 2 | CAGCTCCACG | CAGCUCCACG |
| | (pos 5) | | |
| | Exon 1 | CGCTGTCAAG | CGCUGUCAAG |
| | STOP 3 | TCCAGTTCTA | UCCAGUUCUA |
| | (pos 7) | | |
| | Exon 1 | GCTGTCAAGT | GCUGUCAAGU |
| | STOP 4 | CCAGTTCTAC | CCAGUUCUAC |
| | (pos 6) | | |
| | Exon 1 | CACCCAGATC | CACCCAGAUC |
| | STOP 5 | GTCAGCGCCG | GUCAGCGCCG |
| | (pos 5) | | |
| | Exon 2 SA | CCACAGTCTG | CCACAGUCUG |
| | (pos 8) | AAAGAAAACA | AAAGAAAACA |
| | Exon 2 SA | CACAGTCTGA | CACAGUCUGA |
| | (pos 7) | AAGAAAACAG | AAGAAAACAG |
| | Exon 3 SD | TTACCATGGC | UUACCAUGGC |
| | (pos 4) | CATCAGCACG | CAUCAGCACG |
| | Exon 1 SD | CCACTCACCT | CCACUCACCU |
| | (pos 8) | GCTCTACCCC | GCUCUACCCC |
| CISH | Exon 1 | TCTGCGTTCA | UCUGCGUUCA |
| | STOP | GGGGTAAGCG | GGGGUAAGCG |
| | Exon 1 SD | GCGCTTACCC | GCGCUUACCC |
| | | CTGAACGCAG | CUGAACGCAG |
| | Exon 2 | GACTGGGCAG | GACUGGGCAG |
| | STOP 2 | CGGCCCCTGT | CGGCCCCUGU |
| | Exon 2 | GGACTGGGCA | GGACUGGGCA |
| | STOP 1 | GCGGCCCCTG | GCGGCCCCUG |
| | Exon 2 | GTCATGCAGC | GUCAUGCAGC |
| | STOP 3 | CCTTGCCTGC | CCUUGCCUGC |
| | Exon 2 | TCATGCAGCC | UCAUGCAGCC |
| | STOP 4 | CTTGCCTGCT | CUUGCCUGCU |
| | Exon 2 | CATGCAGCCC | CAUGCAGCCC |
| | STOP 5 | TTGCCTGCTG | UUGCCUGCUG |
| | Exon 2 SD 1 | CTCACCAGAT | CUCACCAGAU |
| | | TCCCGAAGGT | UCCCGAAGGU |
| | Exon 2 SD 2 | CAGACTCACC | CAGACUCACC |
| | | AGATTCCCGA | AGAUUCCCGA |
| | Exon 3 SA 1 | AGCCTAGGCA | AGCCUAGGCA |
| | (pos 4) | AGTGCAGAGG | AGUGCAGAGG |
| | Exon 3 SA 2 | CAGCCTAGGC | CAGCCUAGGC |
| | (pos 5) | AAGTGCAGAG | AAGUGCAGAG |
| | Exon 3 SA 3 | ACCAGCCTAG | ACCAGCCUAG |
| | (pos 7) | GCAAGTGCAG | GCAAGUGCAG |
| | Exon 3 | TGGAACCCCA | UGGAACCCCA |
| | STOP 1 | ATACCAGCCT | AUACCAGCCU |
| | (pos 8) | | |
| | Exon 3 | CACCTGCAGA | CACCUGCAGA |
| | STOP 2 | AGATGCCAGA | AGAUGCCAGA |
| | (pos 7) | | |
| ACAT1 | Exon 1 SD 1 | CGCTCACCTG | CGCUCACCUG |
| | (pos 7) | CACCAGCCTC | CACCAGCCUC |
| | Exon 3 SA | CTTCCTGGCA | CUUCCUGGCA |
| | (pos 5) | AGACACAAGA | AGACACAAGA |
| | Exon 3 | AATTCAGGGA | AAUUCAGGGA |
| | STOP | GCCATTGAAA | GCCAUUGAAA |
| | (pos 5) | | |
| | Exon 3 SD | CTACTGACCT | CUACUGACCU |
| | (pos 8) | GCCTTTTCAA | GCCUUUUCAA |
| | Exon 5 | GCCTCTCAAA | GCCUCUCAAA |
| | STOP | GTCTTATGTG | GUCUUAUGUG |
| | (pos 7) | | |
| | Exon 7 | TTCCCATGCT | UUCCCAUGCU |
| | STOP | GCTTTACTTC | GCUUUACUUC |
| | (pos 4) | | |
| | Exon 8 | TTTAGGTCAA | UUUAGGUCAA |
| | STOP | CCAGATGTAG | CCAGAUGUAG |
| | (pos 8) | | |
| | Exon 9 SA | TGTGCCTGAA | UGUGCCUGAA |
| | (pos 9) | AGCAAAAATG | AGCAAAAAUG |
| | Exon 9 SD | TTACCTACTA | UUACCUACUA |
| | (pos 4) | TTCTTGCCAG | UUCUUGCCAG |
| | Exon 10 SA | AAATGCTGTT | AAAUGCUGUU |
| | (pos 6) | TAAAAAAAGG | UAAAAAAAGG |
| | Exon 11 | CCCCAAAAAG | CCCCAAAAAG |
| | STOP | TGAATATCAA | UGAAUAUCAA |
| | (pos 4) | | |
| Cyp11a | Exon 1 | GTCCAGAATT | GUCCAGAAUU |
| 1 | STOP 1 | TCCAGAAGTA | UCCAGAAGUA |
| | (pos 4) | | |
| | Exon 2 SA 1 | TCCCTGGAGG | UCCCUGGAGG |
| | (pos 4) | GGTGGGGGAG | GGUGGGGGAG |
| | Exon 2 SD 1 | TCACTTCAAC | UCACUUCAAC |
| | (pos 4) | AGGACTCCTA | AGGACUCCUA |
| | Exon 3 SD 1 | CCTTACACTC | CCUUACACUC |
| | (pos 6) | AAAGGCAAAG | AAAGGCAAAG |
| | Exon 4 SA | ATGGCTGCAG | AUGGCUGCAG |
| | (pos 5) | GGAGAGGAAG | GGAGAGGAAG |
| | Exon 4 | GGAGCGCCAG | GGAGCGCCAG |
| | STOP 1 | GGGATGCTGG | GGGAUGCUGG |
| | (pos 8) | | |
| | Exon 4 | TCACGTCCCA | UCACGUCCCA |
| | STOP 2 | TGCAGCCACA | UGCAGCCACA |
| | (pos 8) | | |
| | Exon 6 SA | TGGACGTCTG | UGGACGUCUG |
| | (pos 8) | GTGGGGAGTA | GUGGGGAGUA |
| | Exon 8 | ACTCACATTG | ACUCACAUUG |
| | STOP l | ATGAGGAAGA | AUGAGGAAGA |
| | (pos 6) | | |
| | Exon 9 SA | CAGCATCTGA | CAGCAUCUGA |
| | (pos 7) | GAAAGGCAGA | GAAAGGCAGA |
| | Exon 9 | AATCCAACAC | AAUCCAACAC |
| | STOP 1 | CTCAGCGATG | CUCAGCGAUG |
| | (pos 5) | | |
| | Exon 9 | ATCCAACACC | AUCCAACACC |
| | STOP 2 | TCAGCGATGT | UCAGCGAUGU |
| | (pos 4) | | |
| GATA3 | Exon 1 | CGCGGCGCAG | CGCGGCGCAG |
| | STOP 1 | TACCCGCTGC | UACCCGCUGC |
| | (pos 8) | | |
| | Exon 1 SD 1 | CACTCACCGT | CACUCACCGU |
| | (pos 7) | GGTGGGTCGG | GGUGGGUCGG |
| | Exon 1 SD 2 | ACTCACCGTG | ACUCACCGUG |
| | (pos 6) | GTGGGTCGGA | GUGGGUCGGA |
| | Exon 2 SA 1 | TGGCTCCCTG | UGGCUCCCUG |
| | (pos 8) | TGGGGCAACG | UGGGGCAACG |
| | Exon 2 | GATTCCAGGG | GAUUCCAGGG |
| | STOP 2 | GGAGGCGGTG | GGAGGCGGUG |
| | (pos 5) | | |
| | Exon 2 SD 1 | GCTCCTACCT | GCUCCUACCU |
| | (pos 8) | GTGCTGGACC | GUGCUGGACC |
| | Exon 3 | TCGCCGCCAC | UCGCCGCCAC |
| | STOP 1 | AGTGGGGTCG | AGUGGGGUCG |
| | (pos 7) | | |
| | Exon 4 SA | CAGACTGAGA | CAGACUGAGA |
| | (pos 5) | GTGGGGAGAG | GUGGGGAGAG |
| | Exon 4 | CCTCCTCCAG | CCUCCUCCAG |
| | STOP 1 | AGTGTGGTTG | AGUGUGGUUG |
| | (pos 7) | | |
| NR4A1 | Exon 1 | AGCCATCCCA | AGCCAUCCCA |
| | STOP 1 | GGGAGAGAGC | GGGAGAGAGC |
| | (pos 8) | | |
| | Exon 1 | GCCATCCCAG | GCCAUCCCAG |
| | STOP 2 | GGAGAGAGCT | GGAGAGAGCU |
| | (pos 7) | | |
| | Exon 1 | CCATCCCAGG | CCAUCCCAGG |
| | STOP 3 | GAGAGAGCTG | GAGAGAGCUG |
| | (pos 6) | | |
| | Exon 1 | CTCACAGGCC | CUCACAGGCC |
| | STOP 4 | ACCCACCAGC | ACCCACCAGC |
| | (pos 5) | | |
| | Exon 2 | CCGCTTCCAG | CCGCUUCCAG |
| | STOP 1 | AAGTGCCTGG | AAGUGCCUGG |
| | (pos 8) | | |
| | Exon 2 | CTTCCAGAAG | CUUCCAGAAG |
| | STOP 2 | TGCCTGGCGG | UGCCUGGCGG |
| | (pos 5) | | |
| | Exon 3 SA 1 | ACAACTGCAA | ACAACUGCAA |
| | (pos 5) | AGGAATGGGT | AGGAAUGGGU |
| | Exon 3 SA 2 | CAACTGCAAA | CAACUGCAAA |
| | (pos 4) | GGAATGGGTA | GGAAUGGGUA |
| | Exon 4 SA | GAACTAGGAA | GAACUAGGAA |
| | (pos 4) | GACGGTCCAG | GACGGUCCAG |
| | Exon 4 | GGCTGACCAG | GGCUGACCAG |
| | STOP 1 | GACCTGTTGC | GACCUGUUGC |
| | (pos 8) | | |
| | Exon 4 SD I | CTCACCTGTA | CUCACCUGUA |
| | (pos 5) | CGCCAGGCGG | CGCCAGGCGG |
| | Exon 4 SD 2 | GCTCTCACCT | GCUCUCACCU |
| | (pos 8) | GTACGCCAGG | GUACGCCAGG |
| | Exon 5 SA | CTTAGACCTG | CUUAGACCUG |
| | (pos 8) | GCAGGCAGAT | GCAGGCAGAU |
| | Exon 5 | CAATCCAGTC | CAAUCCAGUC |
| | STOP 1 | CCCGAAGCCA | CCCGAAGCCA |
| | (pos 5) | | |
| | Exon 5 | AATCCAGTCC | AAUCCAGUCC |
| | STOP 2 | CCGAAGCCAC | CCGAAGCCAC |
| | (pos 4) | | |
| | Exon 5 SD 1 | ACTCACCGGT | ACUCACCGGU |
| | (pos 6) | GATGAGGACA | GAUGAGGACA |
| | Exon 5 SD 2 | CTCACCGGTG | CUCACCGGUG |
| | (pos 5) | ATGAGGACAA | AUGAGGACAA |
| | Exon 6 SA | CCGGTCTGCG | CCGGUCUGCG |
| | (pos 6) | GGAAGGGTAC | GGAAGGGUAC |
| | Exon 6 | TGGGCTGCAG | UGGGCUGCAG |
| | STOP 1 | GAGCCGCGGC | GAGCCGCGGC |
| | (pos 8) | | |
| NR4A2 | Exon 1 | TTGTACCAAA | UUGUACCAAA |
| | STOP 1 | TGCCCCTGTC | UGCCCCUGUC |
| | (pos 7) | | |
| | Exon 1 | CGGACAGCAG | CGGACAGCAG |
| | STOP 2 | TCCTCCATTA | UCCUCCAUUA |
| | (pos 8) | | |
| | Exon 1 | AGGTGCAGCA | AGGUGCAGCA |
| | STOP 3 | CAGCCCCATG | CAGCCCCAUG |
| | (pos 6) | | |
| | Exon 1 | GGTGCAGCAC | GGUGCAGCAC |
| | STOP 4 | AGCCCCATGT | AGCCCCAUGU |
| | (pos 5) | | |
| | Exon 1 | AGTTGCCAGA | AGUUGCCAGA |
| | STOP 5 | TGCGCTTCGA | UGCGCUUCGA |
| | (pos 7) | | |
| | Exon 1 | GTTGCCAGAT | GUUGCCAGAU |
| | STOP 6 | GCGCTTCGAC | GCGCUUCGAC |
| | (pos 6) | | |
| | Exon 1 | GTCTCAGCTG | GUCUCAGCUG |
| | STOP 7 | CTCGACACGC | CUCGACACGC |
| | (pos 5) | | |
| | Exon 3 SD | TTCTTACCCT | UUCUUACCCU |
| | (pos 7) | GGAATAGTCC | GGAAUAGUCC |
| | Exon 4 SD | ATTACCTGTA | AUUACCUGUA |
| | (pos 5) | TGCTAATCGA | UGCUAAUCGA |
| | Exon 5 | TTGCAATGCG | UUGCAAUGCG |
| | STOP 1 | TTCGTGGCTT | UUCGUGGCUU |
| | (pos 4) | | |
| | Exon 5 SD | ACTGACCTGT | ACUGACCUGU |
| | (pos 6) | GACCATAGCC | GACCAUAGCC |
| NR4A3 | Exon 2 SA | TATCTGCAGG | UAUCUGCAGG |
| | (pos 4) | GACAGAGAAA | GACAGAGAAA |
| | Exon 2 | TGCGGCGCAG | UGCGGCGCAG |
| | STOP 1 | ACATACAGCT | ACAUACAGCU |
| | (pos 8) | | |
| | Exon 2 | CCCCGCAGGC | CCCCGCAGGC |
| | STOP 2 | GGGGGCGTTA | GGGGGCGUUA |
| | (pos 6) | | |
| | Exon 3 | TTTCAGAAGT | UUUCAGAAGU |
| | STOP 1 | GTCTCAGTGT | GUCUCAGUGU |
| | (pos 4) | | |
| | Exon 5 SD | ATTACCTGAT | AUUACCUGAU |
| | (pos 5) | GGAAAGTCTG | GGAAAGUCUG |
| | Exon 6 | CTTCAGTGCC | CUUCAGUGCC |
| | STOP 1 | TTCGTGGATT | UUCGUGGAUU |
| | (pos 4) | | |
| | Exon 7 SA | TTTCTGCAGA | UUUCUGCAGA |
| | (pos 4) | GGGATAGAGA | GGGAUAGAGA |
| | Exon 7 | AGACCACCAG | AGACCACCAG |
| | STOP 1 | AGTAAGGGAC | AGUAAGGGAC |
| | (pos 8) | | |
| MCJ | Exon 1 | ACTTGCAGCC | ACUUGCAGCC |
| | STOP | CTCGGCCAAA | CUCGGCCAAA |
| | (pos 6) | | |
| FAS | Exon 1 SD | AGGGCTCACC | AGGGCUCACC |
| | (pos 9) | AGAGGTAGGA | AGAGGUAGGA |
| | Exon 3 SA | TTCACCTGCC | UUCACCUGCC |
| | (pos 6) | CAAGGAAAAA | CAAGGAAAAA |
| | Exon 4 SA | CTAAGCCTAG | CUAAGCCUAG |
| | (pos 7) | AAAATCAGTT | AAAAUCAGUU |
| | Exon 5 SA | ACATCTAGAA | ACAUCUAGAA |
| | (pos 5) | AAAAAAATAC | AAAAAAAUAC |
| | Exon 5 SD | ATTACCTTCC | AUUACCUUCC |
| | (pos 5) | TCTTTGCACT | UCUUUGCACU |
| | Exon 6 SA | GATCCTGTAG | GAUCCUGUAG |
| | (pos 5) | GTTGGAACAT | GUUGGAACAU |
| | Exon 6 | AAGCCACCCC | AAGCCACCCC |
| | STOP 1 | AAGTTAGATC | AAGUUAGAUC |
| | (pos 4) | | |
| | Exon 6 SD | AACTTACCCC | AACUUACCCC |
| | (pos 7) | AAACAATTAG | AAACAAUUAG |
| | Exon 7 SD | ATACCTACAG | AUACCUACAG |
| | (pos 8) | GATTTAAAGT | GAUUUAAAGU |
| | Exon 8 SA | GTTTCCTAGA | GUUUCCUAGA |
| | (pos 8) | AAGCAAAAAA | AAGCAAAAAA |
| | Exon 9 | AAGTTCAACT | AAGUUCAACU |
| | STOP 1 | GCTTCGTAAT | GCUUCGUAAU |
| | (pos 6) | | |
| | Exon 9 | AATTCAGACT | AAUUCAGACU |
| | STOP | ATCATCCTCA | AUCAUCCUCA |
| | (pos 5) | | |
| SELPG/ | Exon1 | GCTTGCAGCT | GCUUGCAGCU |
| PSGL1 | STOP 1 | GTGGGACACC | GUGGGACACC |
| | (pos 6) | | |
| | Exon1 | GACCACTCAA | GACCACUCAA |
| | STOP 2 | CCAGTGCCCA | CCAGUGCCCA |
| | (pos 8) | | |
| | Exon1 | GGAGGCACAG | GGAGGCACAG |
| | STOP 3 | ACCACTCCAC | ACCACUCCAC |
| | (pos 8) | | |
| | Exon1 | GGCACAGACA | GGCACAGACA |
| | STOP 4 | ACTCGACTGA | ACUCGACUGA |
| | (pos 5) | | |
| | Exon1 | GGAGGCACAG | GGAGGCACAG |
| | STOP 5 | ACCACTCCAC | ACCACUCCAC |
| | (pos 8) | | |
| | Exon1 | GCACAGACCA | GCACAGACCA |
| | STOP 6 | CTCAACCCAC | CUCAACCCAC |
| | (pos 4) | | |
| | Exon1 | GACCACTCAA | GACCACUCAA |
| | STOP 7 | CCCACAGGCC | CCCACAGGCC |
| | (pos 8) | | |
| | Exon1 | GACCACTCAA | GACCACUCAA |
| | STOP 8 | ACCACAGCCA | ACCACAGCCA |
| | (pos 8) | | |
| | Exon1 | GACCACTCAA | GACCACUCAA |
| | STOP 9 | CCCACAGCCA | CCCACAGCCA |
| | (pos 8) | | |
| | Exon1 | GGAGGCACAG | GGAGGCACAG |
| | STOP 10 | ACCACTCCAC | ACCACUCCAC |
| | (pos 8) | | |
| | Exon1 | GACCACTCAA | GACCACUCAA |
| | STOP 11 | CCAGCAGCCA | CCAGCAGCCA |
| | (pos 8) | | |
| CD3 | | TTCGTATCTG | UUCGUAUCUG |
| | | TAAAACCAAG | UAAAACCAAG |
| CD7 | | CCTACCTGTC | CCUACCUGUC |
| | | ACCAGGACCA | ACCAGGACCA |
| CD52 | | CTCTTACCTG | CUCUUACCUG |
| | | TACCATAACC | UACCAUAACC |
| PD1 | | CACCTACCTA | CACCUACCUA |
| | | AGAACCATCC | AGAACCAUCC |
| B2M | | ACTCACGCTG | ACUCACGCUG |
| | | GATAGCCTCC | GAUAGCCUCC |
| CD5 | | ACTCACCCAG | ACUCACCCAG |
| | | CATCCCCAGC | CAUCCCCAGC |
| CIITA | | CACTCACCTT | CACUCACCUU |
| | | AGCCTGAGCA | AGCCUGAGCA |
| CD2 | | CACGCACCTG | CACGCACCUG |
| | | GACAGCTGAC | GACAGCUGAC |

TABLE 8B

| | | gRNA | | | |
|---|---|---|---|---|---|
| | gRNA | tar- | Orienta- | Target | Predicted |
| Gene | Name | get | tion | Base(s) | Outcome |
| PDCD1 | Ex 1 SD | CAC | Antisense | C7 | splice |
| | | CTA | | | donor |
| | | CCT | | | distrup- |
| | | AAG | | | tion: |
| | | AAC | | | GT → AT |
| | | CAT | | | |
| | | CC | | | |
| PDCD1 | Ex 2 SA | GGA | Antisense | C6 | splice |
| | | GTC | | | donor |
| | | TGA | | | distrup- |
| | | GAG | | | tion: |
| | | ATG | | | AG → AA |
| | | GAG | | | |
| | | AG | | | |
| PDCD1 | Ex 3 SA | TTC | Antisense | C7 | splice |
| | | TCT | | | donor |
| | | CTG | | | distrup- |
| | | GAA | | | tion: |
| | | GGG | | | AG → AA |
| | | CAC | | | |
| | | AA | | | |
| PDCD1 | Ex 3 SD | GAC | Antisense | C8 | splice |
| | | GTT | | | donor |
| | | ACC | | | distrup- |
| | | TCG | | | tion: |
| | | TGC | | | GT → AT |
| | | GGC | | | |
| | | CC | | | |
| PDCD1 | Ex 4 SA | CCT | Antisense | C2 | splice |
| | | GCA | | | donor |
| | | GAG | | | distrup- |
| | | AAA | | | tion: |
| | | CAC | | | AG → AA |
| | | ACT | | | |
| | | TG | | | |
| PDCD1 | Ex 2 | GGG | Antisense | C7, | PmSTO |
| | pmSTOP | GTT | | C8 | P |
| | | CCA | | | Induction: |
| | | GGG | | | TGG |
| | | CCT | | | (Trp) → |
| | | GTC | | | TAG, |
| | | TG | | | TGA, |
| | | | | | TAA |
| PDCD1 | Ex 3 | CAG | Sense | C7 | splice |
| | pmSTOP_1 | TTC | | | donor |
| | | CAA | | | distrup- |
| | | ACC | | | tion: |
| | | CTG | | | CAA |
| | | GTG | | | (Gln) → |
| | | GT | | | TAA |
| PDCD1 | Ex 3 | GGA | Antisense | C5, | PmSTO |
| | pmSTOP_2 | CCC | | C6 | P |
| | | AGA | | | Induction: |
| | | CTA | | | TGG |
| | | GCA | | | (Trp) → |
| | | GCA | | | TAG, |
| | | CC | | | TGA, |
| | | | | | TAA |
| TRAC | Ex 1 SD | CTT | Antisense | C5 | splice |
| | | ACC | | | donor |
| | | TGG | | | distrup- |
| | | GCT | | | tion: |
| | | GGG | | | GT → AT |
| | | GAA | | | |
| | | GA | | | |
| TRAC | Ex 3 SA | TTC | Antisense | C8 | splice |
| | | GTA | | | donor |
| | | TCT | | | distrup- |
| | | GTA | | | tion: |
| | | AAA | | | AG → AA |
| | | CCA | | | |
| | | AG | | | |
| TRAC | Ex 3 | TTT | Sense | C4 | PmSTO |
| | pmSTOP_1 | CAA | | | P |
| | | AAC | | | Induc- |
| | | CTG | | | tion: |
| | | TCA | | | CAA |
| | | GTG | | | (Gln) → |
| | | AT | | | TAA |
| TRAC | Ex 3 | TTC | Sense | C3 | PmSTO |
| | pmSTOP_2 | AAA | | | P |
| | | ACC | | | Induc- |
| | | TGT | | | tion: |
| | | CAG | | | CAA |
| | | TGA | | | (Gln) → |
| | | TT | | | TAA |
| B2M | Ex 1 SD | ACT | Antisense | C6 | splice |
| | | CAC | | | donor |
| | | GCT | | | distrup- |
| | | GGA | | | tion: |
| | | TAG | | | GT → AT |
| | | CCT | | | |
| | | CC | | | |
| B2M | Ex 3 SA | TCG | Antisense | C6 | splice |
| | | ATC | | | donor |
| | | TAT | | | distrup- |
| | | GAA | | | tion: |
| | | AAA | | | AG → AA |
| | | GAC | | | |
| | | AG | | | |
| B2M | Ex 2 | CTT | Antisense | C7, | PmSTOP |
| | pmSTOP | ACC | | C8 | Induc- |
| | | CCA | | | tion: |
| | | CTT | | | TGG |
| | | AAC | | | (Trp) → |
| | | TAT | | | TAG, |
| | | CT | | | TGA, |
| | | | | | TAA |

TABLE 8C

| | | gRNA | gRNA |
|---|---|---|---|
| Gene | Description | Target | spacer |
| ACLY | Exon 1 SA | CCATC | CCAUC |
| | | GGCTC | GGCUC |
| | | GCGGC | GCGGC |
| | | GAGAA | GAGAA |
| | Exon 2 SA | CCTGT | CCUGU |
| | | CTGGG | CUGGG |
| | | AGAGA | AGAGA |
| | | GAAGC | GAAGC |
| | Exon 2 SD 1 | GCTCA | GCUCA |
| | | CCTGG | CCUGG |
| | | CTGAG | CUGAG |
| | | CAGCC | CAGCC |
| | Exon 2 SD 2 | CTCAC | CUCAC |
| | | CTGGC | CUGGC |
| | | TGAGC | UGAGC |
| | | AGCCA | AGCCA |
| | Exon 3 SA | ACCAA | ACCAA |
| | | GTTCT | GUUCU |
| | | GGAAC | GGAAC |
| | | AAAAG | AAAAG |
| | Exon 4 SA 1 | GCCAA | GCCAA |
| | | CCTAC | CCUAC |
| | | AGAAA | AGAAA |
| | | AATTG | AAUUG |
| | Exon 4 SA 2 | CCAAC | CCAAC |
| | | CTACA | CUACA |
| | | GAAAA | GAAAA |
| | | ATTGA | AUUGA |
| | Exon 5 SA | AGCCT | AGCCU |
| | | TGCAG | UGCAG |
| | | GTGAA | GUGAA |
| | | GAGAC | GAGAC |
| | Exon 5 SD 1 | CTCAA | CUCAA |
| | | CTCTT | CUCUU |
| | | TCTTG | UCUUG |
| | | TCTTC | UCUUC |
| | Exon 5 SD 2 | TCAAC | UCAAC |
| | | TCTTT | UCUUU |
| | | CTTGT | CUUGU |
| | | CTTCA | CUUCA |
| | Exon 7 SA | CACTA | CACUA |
| | | CTTCA | CUUCA |
| | | AGGGG | AGGGG |
| | | AGCAG | AGCAG |
| | Exon 12 SD | ACCTA | ACCUA |
| | | CCGAT | CCGAU |
| | | GTGCT | GUGCU |
| | | CCCGC | CCCGC |
| | Exon 13 SA | CTGGC | CUGGC |
| | | GTCTG | GUCUG |
| | | GGGTG | GGGUG |
| | | AGATA | AGAUA |
| | Exon 13 SD | GAGTT | GAGUU |
| | | ACCTT | ACCUU |
| | | GTGGC | GUGGC |
| | | ATGGC | AUGGC |
| | Exon 14 SD | ATCCT | AUCCU |
| | | ACCTT | ACCUU |
| | | GCAGG | GCAGG |
| | | GATCT | GAUCU |
| | Exon 15 SD | TCACG | UCACG |
| | | TGAAA | UGAAA |
| | | GGGTA | GGGUA |
| | | GACCA | GACCA |
| | Exon 16 SD | ATCTA | AUCUA |
| | | CCTGG | CCUGG |
| | | GCATA | GCAUA |
| | | GTTCA | GUUCA |
| | Exon 18 SD | TGATT | UGAUU |
| | | ACCTG | ACCUG |
| | | TCCCC | UCCCC |
| | | ACCAA | ACCAA |
| | Exon 20 SA | CCCCA | CCCCA |
| | | ATCTG | AUCUG |
| | | CCAAG | CCAAG |
| | | GAATG | GAAUG |
| | Exon 20 SD | CCATA | CCAUA |
| | | CCTCA | CCUCA |
| | | GAGGA | GAGGA |
| | | GAACA | GAACA |
| | Exon 23 SA | CAAGC | CAAGC |
| | | TCCTG | UCCUG |
| | | GGCAG | GGCAG |
| | | AGATG | AGAUG |
| | Exon 26 SA | TTATC | UUAUC |
| | | TAGAA | UAGAA |
| | | ATGAA | AUGAA |
| | | CCCAA | CCCAA |
| ADORA2A | Exon 1 ATG | TGGGC | UGGGC |
| | | ATGGC | AUGGC |
| | | CACAG | CACAG |
| | | ACGAC | ACGAC |
| | Exon 1 SD | CTGCT | CUGCU |
| | | CACCG | CACCG |
| | | GAGCG | GAGCG |
| | | GGATG | GGAUG |
| | Exon 2 Stop 1 | CAGTT | CAGUU |
| | | GTTCC | GUUCC |
| | | AACCT | AACCU |
| | | AGCAT | AGCAU |
| | Exon 2 STOP 2 | CACTC | CACUC |
| | | CCAGG | CCAGG |
| | | GCTGC | GCUGC |
| | | GGGGA | GGGGA |
| | Exon 2 STOP 3 | CCACT | CCACU |
| | | CCCAG | CCCAG |
| | | GGCTG | GGCUG |
| | | CGGGG | CGGGG |
| | Exon 2 STOP 4 | GCGAC | GCGAC |
| | | GACAG | GACAG |
| | | CTGAA | CUGAA |
| | | GCAGA | GCAGA |
| | Exon 2 STOP 5 | GGAGA | GGAGA |
| | | GCCAG | GCCAG |
| | | CCTCT | CCUCU |
| | | GCCGG | GCCGG |
| | Exon 2 STOP 6 | ACATG | ACAUG |
| | | AGCCA | AGCCA |
| | | GAGAG | GAGAG |
| | | GGGCG | GGGCG |
| | Exon 2 STOP 7 | GAGGC | GAGGC |
| | | AGCAA | AGCAA |
| | | GAACC | GAACC |
| | | TTTCA | UUUCA |
| | Exon 2 STOP 8 | TGGCC | UGGCC |
| | | CACAC | CACAC |
| | | TCCTG | UCCUG |
| | | GCGGG | GCGGG |
| | Exon 2 STOP 9 | CGTTG | CGUUG |
| | | GCCCA | GCCCA |
| | | CACTC | CACUC |
| | | CTGGC | CUGGC |
| | Exon 2 STOP 10 | CTGGG | CUGGG |
| | | ACTCT | ACUCU |
| | | TGGGC | UGGGC |
| | | ACTCC | ACUCC |
| AXL | Exon 2 SA 1 | TGCGT | UGCGU |
| | | GCCTG | GCCUG |
| | | GAGGG | GAGGG |
| | | GAGAT | GAGAU |
| | Exon 2 SA 2 | CTGCG | CUGCG |
| | | TGCCT | UGCCU |
| | | GGAGG | GGAGG |
| | | GGAGA | GGAGA |
| | Exon 3 SA | GGTGA | GGUGA |
| | | TTCTG | UUCUG |
| | | ACAGG | ACAGG |
| | | GCAAG | GCAAG |
| | Exon 4 SA | AAGCC | AAGCC |
| | | TAGCG | UAGCG |
| | | GGGTG | GGGUG |
| | | GGCAG | GGCAG |
| | Exon 4 SD | CGGAC | CGGAC |
| | | TCACC | UCACC |
| | | TGGAA | UGGAA |
| | | CATGC | CAUGC |
| | Exon 5 SA 1 | AGCCC | AGCCC |
| | | TAGGG | UAGGG |
| | | AGTCA | AGUCA |
| | | TATGA | UAUGA |
| | Exon 5 SA 2 | CAGCC | CAGCC |
| | | CTAGG | CUAGG |
| | | GAGTC | GAGUC |
| | | ATATG | AUAUG |
| | Exon 6 SD 1 | TCTCA | UCUCA |
| | | CCTGC | CCUGC |
| | | AGGGT | AGGGU |
| | | GCAGT | GCAGU |
| | Exon 6 SD 2 | GTCTC | GUCUC |
| | | ACCTG | ACCUG |
| | | CAGGG | CAGGG |
| | | TGCAG | UGCAG |
| | Exon 7 SA 1 | CACAG | CACAG |
| | | CCTGA | CCUGA |
| | | GGAGA | GGAGA |
| | | GGCAA | GGCAA |
| | Exon 7 SA 2 | GCACA | GCACA |
| | | GCCTG | GCCUG |
| | | AGGAG | AGGAG |
| | | AGGCA | AGGCA |
| | Exon 8 SA 1 | GCACT | GCACU |
| | | GGAGG | GGAGG |
| | | ACAGG | ACAGG |
| | | GAAGA | GAAGA |
| | Exon 8 SA 2 | GGCAC | GGCAC |
| | | TGGAG | UGGAG |
| | | GACAG | GACAG |
| | | GGAAG | GGAAG |
| | Exon 8 SD | CACCC | CACCC |
| | | ACCTC | ACCUC |
| | | TGGGG | UGGGG |
| | | TGTCC | UGUCC |
| | Exon 9 SA | GCACC | GCACC |
| | | TAGGA | UAGGA |
| | | GGTCC | GGUCC |
| | | AGAAG | AGAAG |
| | Exon 10 SD | CCCTT | CCCUU |
| | | ACCCA | ACCCA |
| | | GCTGG | GCUGG |
| | | TGGAC | UGGAC |
| | Exon 11 SA | CTTCA | CUUCA |
| | | CTATC | CUAUC |
| | | AGGGG | AGGGG |
| | | GTATG | GUAUG |
| | Exon 12 SA | TCACT | UCACU |
| | | TACAG | UACAG |
| | | GTAGC | GUAGC |
| | | TTCAG | UUCAG |
| | Exon 13 SA 1 | GTTCA | GUUCA |
| | | CTGCA | CUGCA |
| | | TGCAA | UGCAA |
| | | GGTTG | GGUUG |
| | Exon 13 SA 2 | TGTTC | UGUUC |
| | | ACTGC | ACUGC |
| | | ATGCA | AUGCA |
| | | AGGTT | AGGUU |
| | Exon 13 SA 3 | CTGTT | CUGUU |
| | | CACTG | CACUG |
| | | CATGC | CAUGC |
| | | AAGGT | AAGGU |
| | Exon 14 SA 1 | CTCTC | CUCUC |
| | | CTGTG | CUGUG |
| | | GGGGG | GGGGG |
| | | CCAGA | CCAGA |
| | Exon 14 SA 2 | ACTCT | ACUCU |
| | | CCTGT | CCUGU |
| | | GGGGG | GGGGG |
| | | GCCAG | GCCAG |
| | Exon 15 SA | GCAAC | GCAAC |
| | | TTGAG | UUGAG |
| | | GGAGA | GGAGA |
| | | GAGAA | GAGAA |
| | Exon 17 SA | AGGTA | AGGUA |
| | | CTGGG | CUGGG |
| | | GAGCC | GAGCC |
| | | AAGGC | AAGGC |
| | Exon 18 SD | ACCTA | ACCUA |
| | | CCACA | CCACA |
| | | TCGCT | UCGCU |
| | | CTTGC | CUUGC |
| | Exon 19 SA 1 | GGACC | GGACC |
| | | ACTGT | ACUGU |
| | | GAGGG | GAGGG |
| | | GCAGA | GCAGA |
| | Exon 19 SA 2 | AGGAC | AGGAC |
| | | CACTG | CACUG |
| | | TGAGG | UGAGG |
| | | GGCAG | GGCAG |
| | Exon 20 SA | ATACC | AUACC |
| | | TAGGG | UAGGG |
| | | CAGCA | CAGCA |
| | | AAATG | AAAUG |
| BATF | Exon 1 ATG | GAGGC | GAGGC |
| | | ATGGC | AUGGC |
| | | TGAAA | UGAAA |
| | | TCTTC | UCUUC |
| | Exon 1 SD 1 | TCTAC | UCUAC |
| | | CTGTT | CUGUU |
| | | TGCCA | UGCCA |
| | | GGGGG | GGGGG |
| | Exon 1 SD2 | GACTC | GACUC |
| | | TACCT | UACCU |
| | | GTTTG | GUUUG |
| | | CCAGG | CCAGG |
| | Exon 2 SA 1 | AGTCC | AGUCC |
| | | TGGGA | UGGGA |
| | | AGCAG | AGCAG |
| | | AGACG | AGACG |
| | Exon 2 SA 2 | GAGTC | GAGUC |
| | | CTGGG | CUGGG |
| | | AAGCA | AAGCA |
| | | GAGAC | GAGAC |
| | Exon 2 SA 3 | TGAGT | UGAGU |
| | | CCTGG | CCUGG |
| | | GAAGC | GAAGC |
| | | AGAGA | AGAGA |
| | Exon 2 SD | ACTTA | ACUUA |
| | | CCAGG | CCAGG |
| | | TGCAG | UGCAG |
| | | GGTGT | GGUGU |
| BCL2L11 | Exon 1 STOP 1 | GGTAG | GGUAG |
| | | ACAAT | ACAAU |
| | | TGCAG | UGCAG |
| | | CCTG | CCUG |
| | Exon 1 STOP 2 | GCCTC | GCCUC |
| | | CCCAG | CCCAG |
| | | CTCAG | CUCAG |
| | | ACCTG | ACCUG |
| | Exon 1 STOP 3 | TCCCT | UCCCU |
| | | ACAGA | ACAGA |
| | | CAGAG | CAGAG |
| | | CCACA | CCACA |
| | Exon 1 STOP 4 | GAGCC | GAGCC |
| | | ACAAG | ACAAG |
| | | GTAAT | GUAAU |
| | | CCTGA | CCUGA |
| | Exon 3 STOP 1 | GCCCA | GCCCA |
| | | AGAGT | AGAGU |
| | | TGCGG | UGCGG |
| | | CGTAT | CGUAU |
| | Exon 4 SA | AAAAT | AAAAU |
| | | ACCTG | ACCUG |
| | | AAACA | AAACA |
| | | ACAAA | ACAAA |
| CAMK2D | Exon 6 SA 1 | CAATG | CAAUG |
| | | ACTGC | ACUGC |
| | | AAAGA | AAAGA |
| | | TACAA | UACAA |
| | Exon 6 SA 2 | ACAAT | ACAAU |
| | | GACTG | GACUG |
| | | CAAAG | CAAAG |
| | | ATACA | AUACA |
| | Exon 7 SA 3 | AATGA | AAUGA |
| | | CTGCA | CUGCA |
| | | TGCAA | UGCAA |
| | | ACACC | ACACC |
| | Exon 7 SA 2 | ATGAC | AUGAC |
| | | TGCAT | UGCAU |
| | | GCAAA | GCAAA |
| | | CACCA | CACCA |
| | Exon 7 SA 1 | TGACT | UGACU |
| | | GCATG | GCAUG |
| | | CAAAC | CAAAC |
| | | ACCAG | ACCAG |
| | Exon 7 SD | TACTC | UACUC |
| | | ACCTT | ACCUU |
| | | CAGGT | CAGGU |
| | | CCCGA | CCCGA |
| | Exon 8 SD | ACTCA | ACUCA |
| | | CCAAA | CCAAA |
| | | CCACG | CCACG |
| | | CCTGC | CCUGC |
| | Exon 14 SD | TAACT | UAACU |
| | | TACCT | UACCU |
| | | TTACT | UUACU |
| | | CCATC | CCAUC |
| | Exon 16 SD | AGGTA | AGGUA |
| | | TACCA | UACCA |
| | | GCGCT | GCGCU |
| | | GGGGT | GGGGU |
| | Exon 17 SD 1 | TGAAT | UGAAU |
| | | ACCTT | ACCUU |
| | | GTTTC | GUUUC |
| | | CATCA | CAUCA |
| | Exon 17 SD 2 | CTGAA | CUGAA |
| | | TACCT | UACCU |
| | | TGTTT | UGUUU |
| | | CCATC | CCAUC |
| | Exon 19 SA | TCGTG | UCGUG |
| | | CTAAA | CUAAA |
| | | GGCAA | GGCAA |
| | | AAATA | AAAUA |
| cAMP | Exon 1 SD 1 | AGCTC | AGCUC |
| | | ACCAT | ACCAU |
| | | CGTGG | CGUGG |
| | | GCCTG | GCCUG |
| | Exon 1 SD 2 | AAGCT | AAGCU |
| | | CACCA | CACCA |
| | | TCGTG | UCGUG |
| | | GGCCT | GGCCU |
| | Exon 1 SD 3 | AAAGC | AAAGC |
| | | TCACC | UCACC |
| | | ATCGT | AUCGU |
| | | GGGCC | GGGCC |
| | Exon 2 SA | ATCCT | AUCCU |
| | | AGTCA | AGUCA |
| | | GAGGA | GAGGA |
| | | GGAAA | GGAAA |
| | Exon 3 SA | GTTAT | GUUAU |
| | | CCTGG | CCUGG |
| | | GGTTG | GGUUG |
| | | TGTAC | UGUAC |
| CASP8 | Exon “3” SA | GAACC | GAACC |
| | | TTCAA | UUCAA |
| | | AGGAC | AGGAC |
| | | CAAGA | CAAGA |
| | Exon 1 SD | TCACC | UCACC |
| | | CGCTC | CGCUC |
| | | CACCC | CACCC |
| | | TTTCC | UUUCC |
| | Exon 2 SA | ATAAT | AUAAU |
| | | CTAAG | CUAAG |
| | | TCAAA | UCAAA |
| | | ATAAA | AUAAA |
| | Exon 2.5 SA | AGTCC | AGUCC |
| | | ATCTT | AUCUU |
| | | TTTAA | UUUAA |
| | | AAGGC | AAGGC |
| | Exon 3 SA | CATGA | CAUGA |
| | | CCCTG | CCCUG |
| | | TGGTG | UGGUG |
| | | GGAAA | GGAAA |
| | Exon 5 SD | TTACC | UUACC |
| | | ATTTG | AUUUG |
| | | AAAAT | AAAAU |
| | | TCATC | UCAUC |
| CCR5 | Exon 1 STOP | CATAC | CAUAC |
| | | AGTCA | AGUCA |
| | | GTATC | GUAUC |
| | | AATTC | AAUUC |
| | Exon 1 STOP 2 | GGTGT | GGUGU |
| | | CGAAA | CGAAA |
| | | TGAGA | UGAGA |
| | | AGAAG | AGAAG |
| | Exon 1 STOP 3 | ATGCA | AUGCA |
| | | GGTGA | GGUGA |
| | | CAGAG | CAGAG |
| | | ACTCT | ACUCU |
| | Exon 1 STOP 4 | TGGGG | UGGGG |
| | | AGCAG | AGCAG |
| | | GAAAT | GAAAU |
| | | ATCTG | AUCUG |
| CD2 | Ex3 SD | CACGC | CACGC |
| | (pos 8) | ACCTG | ACCUG |
| | | GACAG | GACAG |
| | | CTGAC | CUGAC |
| | Ex3 STOP1 | TCTCA | UCUCA |
| | (Pos 4) | AAACC | AAACC |
| | | AAAGA | AAAGA |
| | | TCTCC | UCUCC |
| | Ex3 STOP2 | CAACA | CAACA |
| | (Pos 6) | CAACC | CAACC |
| | | CTGAC | CUGAC |
| | | CTGTG | CUGUG |
| | Ex4 STOP | AAACA | AAACA |
| | (pos 4) | GAGGA | GAGGA |
| | | GTCGG | GUCGG |
| | | AGAAA | AGAAA |
| | Ex4 STOP2 | TCACC | UCACC |
| | (Pos 5) | AAAAG | AAAAG |
| | | GAAAA | GAAAA |
| | | AACAG | AACAG |
| | Ex5 STOP | ACACA | ACACA |
| | (pos 4) | AGTTC | AGUUC |
| | | ACCAG | ACCAG |
| | | CAGAA | CAGAA |
| | Ex5 STOP | GTTCA | GUUCA |
| | (pos 4) | GCCAA | GCCAA |
| | | AACCT | AACCU |
| | | CCCCA | CCCCA |
| | Exon 2 STOP | CTTGG | CUUGG |
| | (pos 8) | GTCAG | GUCAG |
| | | GACAT | GACAU |
| | | CAACT | CAACU |
| | Exon 2 STOP | CGATG | CGAUG |
| | (pos 8) | ATCAG | AUCAG |
| | | GATAT | GAUAU |
| | | CTACA | CUACA |
| CD3D | Exon 1 SD 1 | AGCCT | AGCCU |
| | | TACCT | UACCU |
| | | TGCGA | UGCGA |
| | | GAGAA | GAGAA |
| | Exon 1 SD 2 | TAGCC | UAGCC |
| | | TTACC | UUACC |
| | | TTGCG | UUGCG |
| | | AGAGA | AGAGA |
| | Exon 1 STOP | TCGCA | UCGCA |
| | | AGGTA | AGGUA |
| | | AGGCT | AGGCU |
| | | ACTCC | ACUCC |
| | Exon 3 SA | GGCAC | GGCAC |
| | | ACTGT | ACUGU |
| | | GGGGG | GGGGG |
| | | AAGGG | AAGGG |
| | Exon 3 STOP | GTGCC | GUGCC |
| | | AGAGC | AGAGC |
| | | TGTGT | UGUGU |
| | | GGAGC | GGAGC |
| | Exon 4 STOP 1 | CCGAC | CCGAC |
| | | ACACA | ACACA |
| | | AGCTC | AGCUC |
| | | TGTTG | UGUUG |
| | Exon 4 STOP 2 | GGTCT | GGUCU |
| | | ATCAG | AUCAG |
| | | GTGAG | GUGAG |
| | | CGTTG | CGUUG |
| | Exon 5 STOP | GATGC | GAUGC |
| | | TCAGT | UCAGU |
| | | ACAGC | ACAGC |
| | | CACCT | CACCU |
| CD3E | Exon 1 ATG | CCGAC | CCGAC |
| | | TGCAT | UGCAU |
| | | CTTTG | CUUUG |
| | | TTTCA | UUUCA |
| | Exon 1 SD | ACTCA | ACUCA |
| | | CCTGA | CCUGA |
| | | TAAGA | UAAGA |
| | | GGCAG | GGCAG |
| | Exon 4 SA | TACCA | UACCA |
| | | CCTGA | CCUGA |
| | | AAATG | AAAUG |
| | | AAAAA | AAAAA |
| | Exon 4 STOP | ACACA | ACACA |
| | | GACAC | GACAC |
| | | GTGAG | GUGAG |
| | | TTTAT | UUUAU |
| | Exon 5 SA 1 | TATAT | UAUAU |
| | | GCTGG | GCUGG |
| | | GGAGA | GGAGA |
| | | AAGAA | AAGAA |
| | Exon 5 SA 2 | TTATA | UUAUA |
| | | TGCTG | UGCUG |
| | | GGGAG | GGGAG |
| | | AAAGA | AAAGA |
| | Exon 5 SD | CTGGA | CUGGA |
| | | TTACC | UUACC |
| | | TCTTG | UCUUG |
| | | CCCTC | CCCUC |
| | Exon 6 SA 1 | ACACT | ACACU |
| | | GTGGG | GUGGG |
| | | GGGTG | GGGUG |
| | | GGGTG | GGGUG |
| | Exon 6 SA 2 | CACAC | CACAC |
| | | TGTGG | UGUGG |
| | | GGGGT | GGGGU |
| | | GGGGT | GGGGU |
| | Exon 6 SA 3 | ACACA | ACACA |
| | | CTGTG | CUGUG |
| | | GGGGG | GGGGG |
| | | TGGGG | UGGGG |
| | Exon 7 SA 1 | TTGTC | UUGUC |
| | | CTGCG | CUGCG |
| | | GAGGA | GAGGA |
| | | AGGAG | AGGAG |
| | Exon 7 SA 2 | TTTGT | UUUGU |
| | | CCTGC | CCUGC |
| | | GGAGG | GGAGG |
| | | AAGGA | AAGGA |
| | Exon 7 SA 3 | TTTTG | UUUUG |
| | | TCCTG | UCCUG |
| | | CGGAG | CGGAG |
| | | GAAGG | GAAGG |
| | Exon 7 SD 1 | GTTAC | GUUAC |
| | | CTCAT | CUCAU |
| | | AGTCT | AGUCU |
| | | GGGTT | GGGUU |
| | Exon 7 SD 2 | CGTTA | CGUUA |
| | | CCTCA | CCUCA |
| | | TAGTC | UAGUC |
| | | TGGGT | UGGGU |
| CD3G | Exon 1 STOP 1 | CATGG | CAUGG |
| | | AACAG | AACAG |
| | | GGGAA | GGGAA |
| | | GGGCC | GGGCC |
| | Exon 1 STOP 2 | CTTCA | CUUCA |
| | | AGGTA | AGGUA |
| | | AGGGC | AGGGC |
| | | CTACT | CUACU |
| | Exon 2 SD 1 | TCTCC | UCUCC |
| | | TACCT | UACCU |
| | | TTGAT | UUGAU |
| | | TGACT | UGACU |
| | Exon 2 SD 2 | TTCTC | UUCUC |
| | | CTACC | CUACC |
| | | TTTGA | UUUGA |
| | | TTGAC | UUGAC |
| | Exon 2 STOP | TGGCC | UGGCC |
| | | CAGTC | CAGUC |
| | | AATCA | AAUCA |
| | | AAGGT | AAGGU |
| | Exon 3 SD | ACATA | ACAUA |
| | | CTTCT | CUUCU |
| | | GTAAT | GUAAU |
| | | ACACT | ACACU |
| | Exon 3 STOP 1 | TGACT | UGACU |
| | | ATCAA | AUCAA |
| | | GAAGA | GAAGA |
| | | TGGTT | UGGUU |
| | Exon 3 STOP 2 | TTTAA | UUUAA |
| | | ACCAT | ACCAU |
| | | GTGAT | GUGAU |
| | | ATTTT | AUUUU |
| | Exon 4 STOP | CTCTT | CUCUU |
| | | CCATT | CCAUU |
| | | GGGTA | GGGUA |
| | | CATAA | CAUAA |
| | Exon 5 STOP | TGACC | UGACC |
| | | AGCTC | AGCUC |
| | | TACCA | UACCA |
| | | GGTAA | GGUAA |
| | Exon 7 STOP 1 | GACCA | GACCA |
| | | GTACA | GUACA |
| | | GCCAC | GCCAC |
| | | CTTCA | CUUCA |
| | Exon 7 STOP 2 | ACCTT | ACCUU |
| | | CAAGG | CAAGG |
| | | AAACC | AAACC |
| | | AGTTG | AGUUG |
| CD4 | Exon 1 ATG | GGTTC | GGUUC |
| | | ATTGT | AUUGU |
| | | GGCCT | GGCCU |
| | | TGCCG | UGCCG |
| | Exon 2 SA | GAGCG | GAGCG |
| | | CTAAG | CUAAG |
| | | TGGAA | UGGAA |
| | | AAGAA | AAGAA |
| | Exon 2 SD | AACCC | AACCC |
| | | TACCT | UACCU |
| | | TTAGT | UUAGU |
| | | TAAGA | UAAGA |
| | Exon 5 SA | GGCAG | GGCAG |
| | | TCACT | UCACU |
| | | GTGGA | GUGGA |
| | | GGGAA | GGGAA |
| | Exon 6 SA | TGGAA | UGGAA |
| | | AGCTG | AGCUG |
| | | GAGGT | GAGGU |
| | | GGGAA | GGGAA |
| | Exon 6 SD | CCTCA | CCUCA |
| | | CCTCT | CCUCU |
| | | CATCA | CAUCA |
| | | CCACC | CCACC |
| | Exon 7 SA | AGTGG | AGUGG |
| | | CTGCA | CUGCA |
| | | GAGGA | GAGGA |
| | | ACGAG | ACGAG |
| | Exon 10 SA | GCGCT | GCGCU |
| | | GTCCA | GUCCA |
| | | GGGAC | GGGAC |
| | | AAGAA | AAGAA |
| | Exon 10 SD | TCCTT | UCCUU |
| | | ACTGA | ACUGA |
| | | GGACA | GGACA |
| | | CTGGC | CUGGC |
| | short alt | CCATC | CCAUC |
| | exon 2 SA | TGGAG | UGGAG |
| | | CTTAG | CUUAG |
| | | GGTCC | GGUCC |
| | Short CD4 ATG | GGTTG | GGUUG |
| | | GCATG | GCAUG |
| | | TGGAG | UGGAG |
| | | GCAGC | GCAGC |
| CD5 | Ex2 STOP 2 | GGGTC | GGGUC |
| | (pos 6) | ATACC | AUACC |
| | | AGCTG | AGCUG |
| | | AGCCG | AGCCG |
| | Ex3 SA | TGGAA | UGGAA |
| | (pos 8) | ATCTG | AUCUG |
| | | GGGGT | GGGGU |
| | | CAGAA | CAGAA |
| | Ex3 SD | GTTAC | GUUAC |
| | (pos 9) | CCACC | CCACC |
| | | TAAGC | UAAGC |
| | | AGGTC | AGGUC |
| | Ex3 STOP | TCTGC | UCUGC |
| | (pos 6) | CAGCG | CAGCG |
| | | GCTGA | GCUGA |
| | | ACTGT | ACUGU |
| | Ex3 STOP | CTGCC | CUGCC |
| | (pos 5) | AGCGG | AGCGG |
| | | CTGAA | CUGAA |
| | | CTGTG | CUGUG |
| | Ex3 STOP | CCTCC | CCUCC |
| | (pos 5/6) | CACTG | CACUG |
| | | CTTGG | CUUGG |
| | | AGCTC | AGCUC |
| | Ex3 STOP | GAAGT | GAAGU |
| | (pos 8) | GCCAG | GCCAG |
| | | GGCCA | GGCCA |
| | | GCTGG | GCUGG |
| | Ex3 STOP | CCATG | CCAUG |
| | (pos 8/9) | TGCCA | UGCCA |
| | | TCCGT | UCCGU |
| | | CCTTG | CCUUG |
| | Ex3 STOP | TTTGC | UUUGC |
| | (pos 9) | AGCCA | AGCCA |
| | | GAGCT | GAGCU |
| | | GGGGC | GGGGC |
| | Ex4 SA | GGTTC | GGUUC |
| | (pos 5) | TGCAA | UGCAA |
| | | TGAGA | UGAGA |
| | | CACTC | CACUC |
| | Ex4 STOP | CTCCA | CUCCA |
| | (pos 4) | GAGCC | GAGCC |
| | | CACAG | CACAG |
| | | GTAAG | GUAAG |
| | Ex4 STOP2 | ACCAC | ACCAC |
| | (Pos 5) | AACTC | AACUC |
| | | CAGAG | CAGAG |
| | | CCCAC | CCCAC |
| | Ex5 SA | GAGCT | GAGCU |
| | (pos 4) | AGGAG | AGGAG |
| | | AGGAG | AGGAG |
| | | AGAGC | AGAGC |
| | Ex5 SD | CTCAC | CUCAC |
| | (pos 9) | TTACC | UUACC |
| | | TGAGC | UGAGC |
| | | AAAGG | AAAGG |
| | Ex5 STOP | CTGCA | CUGCA |
| | (pos 5) | GCTGG | GCUGG |
| | | TGGCA | UGGCA |
| | | CAGTC | CAGUC |
| | Ex5 STOP | GATCT | GAUCU |
| | (pos 7) | TCCAT | UCCAU |
| | | TGGAT | UGGAU |
| | | TGGCA | UGGCA |
| | Ex5 STOP | TGAGG | UGAGG |
| | (pos 8) | CCCAG | CCCAG |
| | | GACAA | GACAA |
| | | GACCC | GACCC |
| | Ex6 SA | AAACC | AAACC |
| | (pos 5) | TGAGA | UGAGA |
| | | GGGGA | GGGGA |
| | | AGCAA | AGCAA |
| | Ex6 STOP | CTCCC | CUCCC |
| | (pos 4/5) | ACCGC | ACCGC |
| | | AGCGA | AGCGA |
| | | GCTCC | GCUCC |
| | Ex6 STOP | TTTCC | UUUCC |
| | (pos 5) | AGCCC | AGCCC |
| | | AAGGT | AAGGU |
| | | GCAGA | GCAGA |
| | Ex6 STOP | GGTGC | GGUGC |
| | (pos 5) | AGAGC | AGAGC |
| | | CGTCT | CGUCU |
| | | GGTGG | GGUGG |
| | Ex6 STOP | AGGTG | AGGUG |
| | (pos 6) | CAGAG | CAGAG |
| | | CCGTC | CCGUC |
| | | TGGTG | UGGUG |
| | Ex6 STOP | TCCTA | UCCUA |
| | (pos 7) | TCGAG | UCGAG |
| | | TGCTG | UGCUG |
| | | GACGC | GACGC |
| | Ex6 STOP | AAGGT | AAGGU |
| | (pos 7) | GCAGA | GCAGA |
| | | GCCGT | GCCGU |
| | | CTGGT | CUGGU |
| | Ex6 STOP | CAAGG | CAAGG |
| | (pos 8) | TGCAG | UGCAG |
| | | AGCCG | AGCCG |
| | | TCTGG | UCUGG |
| | Ex6 STOP | GGGCT | GGGCU |
| | (pos 8/9) | GCCCA | GCCCA |
| | | CTGAG | CUGAG |
| | | CCCCC | CCCCC |
| | Ex6 STOP | AGGTG | AGGUG |
| | (pos 9) | CGCCA | CGCCA |
| | | GGGGG | GGGGG |
| | | CTCAG | CUCAG |
| | Ex7 STOP | GGCCA | GGCCA |
| | (pos 4) | GGATC | GGAUC |
| | | CAAAC | CAAAC |
| | | CCCGC | CCCGC |
| | Ex8 STOP | CGCCA | CGCCA |
| | (pos 4) | GTGGA | GUGGA |
| | | TTGGC | UUGGC |
| | | CCAAC | CCAAC |
| | Ex8 STOP | GCGCC | GCGCC |
| | (pos 5) | AGTGG | AGUGG |
| | | ATTGG | AUUGG |
| | | CCCAA | CCCAA |
| | Ex8 STOP | AAGAA | AAGAA |
| | (pos 7) | GCAGC | GCAGC |
| | | GCCAG | GCCAG |
| | | TGGAT | UGGAU |
| | Ex9 SD | GCTTA | GCUUA |
| | (pos 6) | CCTGG | CCUGG |
| | | ATAAG | AUAAG |
| | | CTGAC | CUGAC |
| | Ex9 SD1 | AAAGA | AAAGA |
| | (Pos 8) | CACTG | CACUG |
| | | GGCAG | GGCAG |
| | | ATGGT | AUGGU |
| | Ex10 SA | TTCCA | UUCCA |
| | (pos 9) | GAGCT | GAGCU |
| | | GGGGA | GGGGA |
| | | AAGAA | AAGAA |
| | Exon 1 SD | ACTCA | ACUCA |
| | (pos 6) | CCCAG | CCCAG |
| | | CATCC | CAUCC |
| | | CCAGC | CCAGC |
| | Exon 2 SA | AGCGA | AGCGA |
| | (pos 6) | CTGCA | CUGCA |
| | | GAAAG | GAAAG |
| | | AAGAG | AAGAG |
| | Exon 2 STOP | CATAC | CAUAC |
| | (pos 5/6) | CAGCT | CAGCU |
| | | GAGCC | GAGCC |
| | | GTCCG | GUCCG |
| CD8A | Exon 1 ATG | AAGGC | AAGGC |
| | | CATGA | CAUGA |
| | | CGCGC | CGCGC |
| | | TCCCC | UCCCC |
| | Exon 1 SD | TCACG | UCACG |
| | | GAGCA | GAGCA |
| | | GCAAG | GCAAG |
| | | GCCAG | GCCAG |
| | Exon 2 SD | CGCGG | CGCGG |
| | | ACCTG | ACCUG |
| | | GCAGG | GCAGG |
| | | AAGAC | AAGAC |
| | Exon 3 SD | TCACC | UCACC |
| | | TGCGC | UGCGC |
| | | CCCCC | CCCCC |
| | | GCCGC | GCCGC |
| | Exon 4 SD 1 | CTTAC | CUUAC |
| | | TGTGG | UGUGG |
| | | TTGCA | UUGCA |
| | | GTAAA | GUAAA |
| | Exon 4 SD 2 | ACTTA | ACUUA |
| | | CTGTG | CUGUG |
| | | GTTGC | GUUGC |
| | | AGTAA | AGUAA |
| CD38 | Exon 1 ATG 1 | TTGGC | UUGGC |
| | | CATAG | CAUAG |
| | | GGCTC | GGCUC |
| | | CAGGC | CAGGC |
| | Exon 1 ATG 2 | GTTGG | GUUGG |
| | | CCATA | CCAUA |
| | | GGGCT | GGGCU |
| | | CCAGG | CCAGG |
| | Exon 1 STOP | GCGCC | GCGCC |
| | | AGCAG | AGCAG |
| | | TGGAG | UGGAG |
| | | CGGTC | CGGUC |
| | Exon 2 SD | AATTA | AAUUA |
| | | CCTTG | CCUUG |
| | | TTGCA | UUGCA |
| | | AGGTA | AGGUA |
| | Exon 2 STOP | CTATC | CUAUC |
| | | AGCCA | AGCCA |
| | | CTAAT | CUAAU |
| | | GAAGT | GAAGU |
| | Exon 3 STOP 1 | CTGCT | CUGCU |
| | | CCAAA | CCAAA |
| | | GAAGA | GAAGA |
| | | ATCTA | AUCUA |
| | Exon 4 STOP 1 | ACTAT | ACUAU |
| | | CAATC | CAAUC |
| | | TTGCC | UUGCC |
| | | CAGAC | CAGAC |
| | Exon 4 STOP 2 | TTT1C | UUUUC |
| | | CAGAA | CAGAA |
| | | TACTG | UACUG |
| | | AAACA | AAACA |
| | Exon 4 STOP 3 | GTTTT | GUUUU |
| | | CCAGA | CCAGA |
| | | ATACT | AUACU |
| | | GAAAC | GAAAC |
| | Exon 7 SD | TTACC | UUACC |
| | | TGTAG | UGUAG |
| | | ATATT | AUAUU |
| | | CTTGC | CUUGC |
| CD70 | Ex1 SD | CTCAC | CUCAC |
| | (pos 6) | CCCAA | CCCAA |
| | | GTGAC | GUGAC |
| | | TCGAG | UCGAG |
| | Ex1 STOP | GTGCA | GUGCA |
| | (pos 8) | TCCAG | UCCAG |
| | | CGCTT | CGCUU |
| | | CGCAC | CGCAC |
| | Ex2 STOP | GAGCT | GAGCU |
| | (pos 7) | GCAGC | GCAGC |
| | | TGAAT | UGAAU |
| | | CACAC | CACAC |
| | Ex3 STOP | CTGGC | CUGGC |
| | (pos 5) | AGGGG | AGGGG |
| | | GGCCC | GGCCC |
| | | AGCAC | AGCAC |
| | Ex3 STOP | CTCCC | CUCCC |
| | (pos 5) | AGCGC | AGCGC |
| | | CTGAC | CUGAC |
| | | GCCCC | GCCCC |
| | Ex3 STOP | CCCCC | CCCCC |
| | (pos 8) | TGCCA | UGCCA |
| | | GTATA | GUAUA |
| | | GCCTG | GCCUG |
| | Ex3 STOP | CCCCC | CCCCC |
| | (pos 9) | CTGCC | CUGCC |
| | | AGTAT | AGUAU |
| | | AGCCT | AGCCU |
| CD82 | Exon 1 ATG | TGAGC | UGAGC |
| | | CCATC | CCAUC |
| | | CCGCC | CCGCC |
| | | AGTCC | AGUCC |
| | Exon 3 SD | TCACC | UCACC |
| | | AGCCC | AGCCC |
| | | CAGCA | CAGCA |
| | | GGCAG | GGCAG |
| | Exon 4 SA | AAGTA | AAGUA |
| | | CTGGG | CUGGG |
| | | GACAC | GACAC |
| | | AGAGC | AGAGC |
| | Exon 6 SA 1 | ACTTC | ACUUC |
| | | ACCTG | ACCUG |
| | | GGCAA | GGCAA |
| | | GGCAG | GGCAG |
| | Exon 6 SA 2 | CACTT | CACUU |
| | | CACCT | CACCU |
| | | GGGCA | GGGCA |
| | | AGGCA | AGGCA |
| | Exon 6 SD | CCGCA | CCGCA |
| | | CACCT | CACCU |
| | | CCTGG | CCUGG |
| | | TACAC | UACAC |
| | Exon 7 SA | AGCCC | AGCCC |
| | | TGCAA | UGCAA |
| | | GGGCA | GGGCA |
| | | GAATG | GAAUG |
| | Exon 8 SA | CCAGG | CCAGG |
| | | AGCTG | AGCUG |
| | | TGGGG | UGGGG |
| | | AGAGG | AGAGG |
| CD86 | Ex2 SD | GTTCT | GUUCU |
| | (pos 8) | TACCA | UACCA |
| | | GAGAG | GAGAG |
| | | CAGGA | CAGGA |
| | Ex3 SA | GCACC | GCACC |
| | (pos 5) | TAAAA | UAAAA |
| | | AAGAA | AAGAA |
| | | GGTTA | GGUUA |
| | Ex3 STOP | TTGGC | UUGGC |
| | (pos 5) | AGGAC | AGGAC |
| | | CAGGA | CAGGA |
| | | AAACT | AAACU |
| | Ex3 STOP | CAATC | CAAUC |
| | (pos 8) | TTCAG | UUCAG |
| | | ATCAA | AUCAA |
| | | GGACA | GGACA |
| | Ex5 STOP | GTAAT | GUAAU |
| | (pos 6/7) | CCAAG | CCAAG |
| | | GAATG | GAAUG |
| | | TGGTC | UGGUC |
| | Ex6 STOP | AGAGT | AGAGU |
| | (pos 9) | GAACA | GAACA |
| | | GACCA | GACCA |
| | | AGAAA | AGAAA |
| CD160 | Exon 1 STOP | GGACA | GGACA |
| | | TCCAG | UCCAG |
| | | TCTGG | UCUGG |
| | | TGGTG | UGGUG |
| | Exon 2 SA | AATGC | AAUGC |
| | | ATCCT | AUCCU |
| | | GGAAT | GGAAU |
| | | GGAAA | GGAAA |
| | Exon 2 SD | GCACT | GCACU |
| | | CACCT | CACCU |
| | | GTGAA | GUGAA |
| | | TAGAA | UAGAA |
| | Exon 2 STOP | TAAAA | UAAAA |
| | | CAGCT | CAGCU |
| | | GAGAC | GAGAC |
| | | TTAAA | UUAAA |
| | Exon 3 STOP 1 | GCTTC | GCUUC |
| | | CTACA | CUACA |
| | | AGAAA | AGAAA |
| | | AGGTC | AGGUC |
| | Exon 3 STOP 2 | TTACC | UUACC |
| | | CAGAC | CAGAC |
| | | CTTTT | CUUUU |
| | | CTTGT | CUUGU |
| CD244 | Exon 1 ATG 1 | CAGCA | CAGCA |
| | | TTTCC | UUUCC |
| | | ACAGG | ACAGG |
| | | ACAGA | ACAGA |
| | Exon 1 ATG 2 | CCAGC | CCAGC |
| | | ATTTC | AUUUC |
| | | CACAG | CACAG |
| | | GACAG | GACAG |
| | Exon 2 SD | ACTTA | ACUUA |
| | | CCAAA | CCAAA |
| | | TACAA | UACAA |
| | | AAACC | AAACC |
| | Exon 3 SA | GATTC | GAUUC |
| | | TGATC | UGAUC |
| | | AGAAA | AGAAA |
| | | GGCAT | GGCAU |
| | Exon 4 SA | TGAAT | UGAAU |
| | | TCTGA | UCUGA |
| | | GGAAT | GGAAU |
| | | ACAGA | ACAGA |
| | Exon 5 SA | ATGAC | AUGAC |
| | | ATACG | AUACG |
| | | TGATT | UGAUU |
| | | TCTCC | UCUCC |
| | Exon 6 SA | TCCTG | UCCUG |
| | | CTCCT | CUCCU |
| | | GCACA | GCACA |
| | | AGAAA | AGAAA |
| | Exon 8 SA | TCACC | UCACC |
| | | CTAGG | CUAGG |
| | | AGCAA | AGCAA |
| | | AACAA | AACAA |
| CD276 | Exon 1 ATG | CGCAG | CGCAG |
| | | CATCT | CAUCU |
| | | TCCTG | UCCUG |
| | | TGAGG | UGAGG |
| | Exon 2 SA | GCTCC | GCUCC |
| | | TGGGG | UGGGG |
| | | GTAGG | GUAGG |
| | | GGGAG | GGGAG |
| | Exon 2 SD | GGTGC | GGUGC |
| | | TCACC | UCACC |
| | | GGCCA | GGCCA |
| | | CCTGC | CCUGC |
| | Exon 3 SA 1 | AGGGA | AGGGA |
| | | GCTGG | GCUGG |
| | | AGGTG | AGGUG |
| | | ACAGA | ACAGA |
| | Exon 3 SA 2 | TAGGG | UAGGG |
| | | AGCTG | AGCUG |
| | | GAGGT | GAGGU |
| | | GACAG | GACAG |
| | Exon 3 SD 1 | GCAAC | GCAAC |
| | | CTGTG | CUGUG |
| | | GGGCT | GGGCU |
| | | TCTCT | UCUCU |
| | Exon 3 SD 2 | AGCAA | AGCAA |
| | | CCTGT | CCUGU |
| | | GGGGC | GGGGC |
| | | TTCTC | UUCUC |
| | Exon 4 SA 1 | CTCCT | CUCCU |
| | | GGGGG | GGGGG |
| | | CGGGG | CGGGG |
| | | TCAGA | UCAGA |
| | Exon 4 SA 2 | GCTCC | GCUCC |
| | | TGGGG | UGGGG |
| | | GCGGG | GCGGG |
| | | GTCAG | GUCAG |
| | Exon 4 SD | GGTGC | GGUGC |
| | | TCACC | UCACC |
| | | GGCCA | GGCCA |
| | | CCTGC | CCUGC |
| | Exon 5 SA 1 | AGGGA | AGGGA |
| | | GCTGG | GCUGG |
| | | AGGTG | AGGUG |
| | | ACAGA | ACAGA |
| | Exon 5 SA 2 | TAGGG | UAGGG |
| | | AGCTG | AGCUG |
| | | GAGGT | GAGGU |
| | | GACAG | GACAG |
| | Exon 8 SA | GCAGG | GCAGG |
| | | GCTGT | GCUGU |
| | | AAAAA | AAAAA |
| | | AAGGA | AAGGA |
| | Exon 9 SA 1 | CATCA | CAUCA |
| | | TCTTC | UCUUC |
| | | ATTTC | AUUUC |
| | | ATGAT | AUGAU |
| | Exon 9 SA 2 | CCATC | CCAUC |
| | | ATCTT | AUCUU |
| | | CATTT | CAUUU |
| | | CATGA | CAUGA |
| CDK8 | Exon 1 ATG | GTCCA | GUCCA |
| | | TTGTC | UUGUC |
| | | ACAGC | ACAGC |
| | | CTCTG | CUCUG |
| | Exon 1 SD | CACTC | CACUC |
| | | ACCCA | ACCCA |
| | | TCTTT | UCUUU |
| | | CCTCT | CCUCU |
| | Exon 10 SD 2 | ACTTA | ACUUA |
| | | CTCTG | CUCUG |
| | | ATGTA | AUGUA |
| | | GGAAG | GGAAG |
| | Exon 10 SD 1 | CTTAC | CUUAC |
| | | TCTGA | UCUGA |
| | | TGTAG | UGUAG |
| | | GAAGT | GAAGU |
| | Exon 12 SD | TTGGA | UUGGA |
| | | ATACC | AUACC |
| | | TGATA | UGAUA |
| | | GTCTG | GUCUG |
| | Exon 13 SA 2 | GGAAC | GGAAC |
| | | GCTGG | GCUGG |
| | | AAAGG | AAAGG |
| | | AGATG | AGAUG |
| | Exon 13 SA 1 | GAACG | GAACG |
| | | CTGGA | CUGGA |
| | | AAGGA | AAGGA |
| | | GATGA | GAUGA |
| CDKN1B | Exon 1 ATG | ACGTT | ACGUU |
| | | TGACA | UGACA |
| | | TCTTT | UCUUU |
| | | CTCCC | CUCCC |
| | Exon 1 STOP 1 | CAAAC | CAAAC |
| | | GTGCG | GUGCG |
| | | AGTGT | AGUGU |
| | | CTAAC | CUAAC |
| | Exon 1 STOP 2 | CGAGT | CGAGU |
| | | GGCAA | GGCAA |
| | | GAGGT | GAGGU |
| | | GGAGA | GGAGA |
| | Exon 1 STOP 3 | GAGTG | GAGUG |
| | | GCAAG | GCAAG |
| | | AGGTG | AGGUG |
| | | GAGAA | GAGAA |
| | Exon 1 STOP 4 | AGGAG | AGGAG |
| | | AGCCA | AGCCA |
| | | GGATG | GGAUG |
| | | TCAGC | UCAGC |
| | Exon 1 STOP 5 | GGACA | GGACA |
| | | GCCAG | GCCAG |
| | | ACGGG | ACGGG |
| | | GTTAG | GUUAG |
| | Exon 1 STOP 6 | CGGAG | CGGAG |
| | | CAATG | CAAUG |
| | | CGCAG | CGCAG |
| | | GAATA | GAAUA |
| | Exon 1 STOP 7 | AGGAA | AGGAA |
| | | GCGAC | GCGAC |
| | | CTGCA | CUGCA |
| | | ACCGA | ACCGA |
| | Exon 2 STOP | GAGCA | GAGCA |
| | | GACGC | GACGC |
| | | CCAAG | CCAAG |
| | | AAGCC | AAGCC |
| CSF2 | Exon 1 STOP 1 | GCTGC | GCUGC |
| | | AGAGC | AGAGC |
| | | CTGCT | CUGCU |
| | | GCTCT | GCUCU |
| | Exon 1 STOP 2 | GCTCC | GCUCC |
| | | CAGGG | CAGGG |
| | | CTGCG | CUGCG |
| | | TGCTG | UGCUG |
| | Exon 1 STOP 3 | TGCTC | UGCUC |
| | | CCAGG | CCAGG |
| | | GCTGC | GCUGC |
| | | GTGCT | GUGCU |
| | Exon 1 STOP 4 | ATGCT | AUGCU |
| | | CCCAG | CCCAG |
| | | GGCTG | GGCUG |
| | | CGTGC | CGUGC |
| | Exon 3 SD | AGGCA | AGGCA |
| | (pos 10) | CTCAC | CUCAC |
| | | CGGGG | CGGGG |
| | | TTGGA | UUGGA |
| | Exon 4 STOP 1 | CTGGC | CUGGC |
| | | TCCCA | UCCCA |
| | | GCAGT | GCAGU |
| | | CAAAG | CAAAG |
| CSK | Exon 1 ATG | TGACA | UGACA |
| | | TCTTC | UCUUC |
| | | TCAGG | UCAGG |
| | | AGCTC | AGCUC |
| | Exon 3 SD | TCACG | UCACG |
| | | GCATG | GCAUG |
| | | AGGCT | AGGCU |
| | | GAGTT | GAGUU |
| | Exon 4 SA 1 | GAACC | GAACC |
| | | AACTG | AACUG |
| | | GGGAG | GGGAG |
| | | CAGCA | CAGCA |
| | Exon 4 SA 2 | GGAAC | GGAAC |
| | | CAACT | CAACU |
| | | GGGGA | GGGGA |
| | | GCAGC | GCAGC |
| | Exon 4 SD | TCACC | UCACC |
| | | TCCAC | UCCAC |
| | | CAGCT | CAGCU |
| | | GCATG | GCAUG |
| | Exon 5 SA 1 | GTAGT | GUAGU |
| | | GCTGC | GCUGC |
| | | AGGGT | AGGGU |
| | | GTGGG | GUGGG |
| | Exon 5 SA 2 | TGTAG | UGUAG |
| | | TGCTG | UGCUG |
| | | CAGGG | CAGGG |
| | | TGTGG | UGUGG |
| | Exon 7 SA 1 | CACGT | CACGU |
| | | CTGGG | CUGGG |
| | | GGCAG | GGCAG |
| | | AGAGG | AGAGG |
| | Exon 7 SA 2 | CATCA | CAUCA |
| | | CGTCT | CGUCU |
| | | GGGGG | GGGGG |
| | | CAGAG | CAGAG |
| | Exon 9 SA | AGGCT | AGGCU |
| | | CCCCT | CCCCU |
| | | GGGGG | GGGGG |
| | | CAGGA | CAGGA |
| | Exon 9 SD | TCACT | UCACU |
| | | CACAG | CACAG |
| | | CGAGA | CGAGA |
| | | ACTTG | ACUUG |
| | Exon 10 SD | CAGCC | CAGCC |
| | | CCACC | CCACC |
| | | TTCTC | UUCUC |
| | | TCTCA | UCUCA |
| | Exon 11 SA | GAGAA | GAGAA |
| | | TTTCT | UUUCU |
| | | GCCAT | GCCAU |
| | | GTGGA | GUGGA |
| | Exon USD | ATACT | AUACU |
| | | CACAA | CACAA |
| | | TTCTT | UUCUU |
| | | GGATA | GGAUA |
| | Exon 12 SA | CAGGG | CAGGG |
| | | GCTGT | GCUGU |
| | | GGCCA | GGCCA |
| | | GGGGG | GGGGG |
| CTLA-4 | Exon 1 SD | ACTCA | ACUCA |
| | (pos 6) | CCTTT | CCUUU |
| | | GCAGA | GCAGA |
| | | AGACA | AGACA |
| | Exon 1 SD | CACTC | CACUC |
| | | ACCTT | ACCUU |
| | | TGCAG | UGCAG |
| | | AAGAC | AAGAC |
| | Exon 1 STOP | AGGGC | AGGGC |
| | (pos5) | CAGGT | CAGGU |
| | | CCTGG | CCUGG |
| | | TAGCC | UAGCC |
| | Exon 2 STOP | GGCCC | GGCCC |
| | | AGCCT | AGCCU |
| | | GCTGT | GCUGU |
| | | GGTAC | GGUAC |
| | Exon 2 STOP | GCTTC | GCUUC |
| | (pos 8) | GGCAG | GGCAG |
| | | GCTGA | GCUGA |
| | | CAGCC | CAGCC |
| | Exon 2 STOP | ++TATCC | ++UAUCC |
| | | AAGGA | AAGGA |
| | | CTGAG | CUGAG |
| | | GGCCA | GGCCA |
| | Exon 2 STOP | GGAAC | GGAAC |
| | | CCAGA | CCAGA |
| | | TTTAT | UUUAU |
| | | GTAAT | GUAAU |
| | Exon 2 SD | GCTCA | GCUCA |
| | | CCAAT | CCAAU |
| | | TACAT | UACAU |
| | | AAATC | AAAUC |
| | Exon 2 SD | CTCAC | CUCAC |
| | | CAATT | CAAUU |
| | | ACATA | ACAUA |
| | | AATCT | AAUCU |
| | Exon 1 STOP | CTCAG | CUCAG |
| | | CTGAA | CUGAA |
| | | CCTGG | CCUGG |
| | | CTACC | CUACC |
| CUL3 | Exon 1/2 | TTAAC | UUAAC |
| | SA ATG | ATCTA | AUCUA |
| | | CTACA | CUACA |
| | | TACAA | UACAA |
| | Exon 6 SD | CTTAC | CUUAC |
| | | CTGGA | CUGGA |
| | | TATAG | UAUAG |
| | | TCAAC | UCAAC |
| | Exon 2 STOP | ATCCA | AUCCA |
| | | GCGTA | GCGUA |
| | | AGAAT | AGAAU |
| | | AACAG | AACAG |
| | Exon 4 STOP 1 | GTATG | GUAUG |
| | | TACAA | UACAA |
| | | CAAAA | CAAAA |
| | | TAATG | UAAUG |
| | Exon 4 STOP 2 | CGAGA | CGAGA |
| | | TCAAG | UCAAG |
| | | TTGTA | UUGUA |
| | | CGTTA | CGUUA |
| | Exon 5 STOP | TGCCA | UGCCA |
| | | GATGT | GAUGU |
| | | TAATG | UAAUG |
| | | A1TTT | AUUUU |
| | Exon 9 STOP | ATGTC | AUGUC |
| | | AGTTC | AGUUC |
| | | ACGTC | ACGUC |
| | | AAAAC | AAAAC |
| | Exon 14 STOP | GCCCT | GCCCU |
| | | ACAGT | ACAGU |
| | | CCCTC | CCCUC |
| | | GCCTG | GCCUG |
| Cyp11a1 | Exon 1 STOP 1 | GTCCA | GUCCA |
| | (pos 4) | GAATT | GAAUU |
| | | TCCAG | UCCAG |
| | | AAGTA | AAGUA |
| | Exon 2 SA 1 | TCCCT | UCCCU |
| | (pos 4) | GGAGG | GGAGG |
| | | GGTGG | GGUGG |
| | | GGGAG | GGGAG |
| | Exon 2 SD 1 | TCACT | UCACU |
| | (pos 4) | TCAAC | UCAAC |
| | | AGGAC | AGGAC |
| | | TCCTA | UCCUA |
| | Exon 3 SD 1 | CCTTA | CCUUA |
| | (pos 6) | CACTC | CACUC |
| | | AAAGG | AAAGG |
| | | CAAAG | CAAAG |
| | Exon 4 SA | ATGGC | AUGGC |
| | (pos 5) | TGCAG | UGCAG |
| | | GGAGA | GGAGA |
| | | GGAAG | GGAAG |
| | Exon 4 STOP 1 | GGAGC | GGAGC |
| | (pos 8) | GCCAG | GCCAG |
| | | GGGAT | GGGAU |
| | | GCTGG | GCUGG |
| | Exon 4 STOP 2 | TCACG | UCACG |
| | (pos 8) | TCCCA | UCCCA |
| | | TGCAG | UGCAG |
| | | CCACA | CCACA |
| | Exon 6 SA | TGGAC | UGGAC |
| | (pos 8) | GTCTG | GUCUG |
| | | GTGGG | GUGGG |
| | | GAGTA | GAGUA |
| | Exon 8 STOP 1 | ACTCA | ACUCA |
| | (pos 6) | CATTG | CAUUG |
| | | ATGAG | AUGAG |
| | | GAAGA | GAAGA |
| | Exon 9 SA | CAGCA | CAGCA |
| | (pos 7) | TCTGA | UCUGA |
| | | GAAAG | GAAAG |
| | | GCAGA | GCAGA |
| | Exon 9 STOP 1 | AATCC | AAUCC |
| | (pos 5) | AACAC | AACAC |
| | | CTCAG | CUCAG |
| | | CGATG | CGAUG |
| | Exon 9 STOP 2 | ATCCA | AUCCA |
| | (pos 4) | ACACC | ACACC |
| | | TCAGC | UCAGC |
| | | GATGT | GAUGU |
| DCK | Exon 1 ATG | GTGGC | GUGGC |
| | | CATTC | CAUUC |
| | | CTTAG | CUUAG |
| | | TCTTG | UCUUG |
| | Exon 1 SD | CTTAC | CUUAC |
| | | CGATG | CGAUG |
| | | TTCCC | UUCCC |
| | | TTCGA | UUCGA |
| | Exon 2 STOP 1 | TTAAA | UUAAA |
| | | CAATT | CAAUU |
| | | GTGTG | GUGUG |
| | | AAGAT | AAGAU |
| | Exon 2 STOP 2 | TAAAC | UAAAC |
| | | AATTG | AAUUG |
| | | TGTGA | UGUGA |
| | | AGATT | AGAUU |
| | Exon 2 STOP 3 | CACCA | CACCA |
| | | TCTGG | UCUGG |
| | | CAACA | CAACA |
| | | GGTTC | GGUUC |
| | Exon 2 STOP 4 | AAGTA | AAGUA |
| | | CTCAA | CUCAA |
| | | GATGA | GAUGA |
| | | ATTTG | AUUUG |
| | Exon 3 STOP 1 | CAATG | CAAUG |
| | | TCTCA | UCUCA |
| | | GAAAA | GAAAA |
| | | ATGGT | AUGGU |
| | Exon 3 STOP 2 | GCTCA | GCUCA |
| | | GCTTG | GCUUG |
| | | CCTCT | CCUCU |
| | | CTGAA | CUGAA |
| | Exon 4 STOP 1 | TTTAT | UUUAU |
| | | CAAGA | CAAGA |
| | | CTGGC | CUGGC |
| | | ATGAC | AUGAC |
| | Exon 4 STOP 2 | ATTTG | AUUUG |
| | | GCCAA | GCCAA |
| | | AGCCT | AGCCU |
| | | TGAAT | UGAAU |
| | Exon 4 STOP 3 | TTATC | UUAUC |
| | | TTCAA | UUCAA |
| | | GCCAC | GCCAC |
| | | TCCAG | UCCAG |
| | Exon 5 SD | CTTAC | CUUAC |
| | | TTCAG | UUCAG |
| | | TGTCC | UGUCC |
| | | TATGC | UAUGC |
| DGKA | Exon 1 ATG | ACCCC | ACCCC |
| | | ATTTT | AUUUU |
| | | GTTCC | GUUCC |
| | | GCCTC | GCCUC |
| | Exon 5 SD | TCACA | UCACA |
| | | TTCTA | UUCUA |
| | | ACTTG | ACUUG |
| | | TCTTC | UCUUC |
| | Exon 6 SA 1 | TGACT | UGACU |
| | | GTGGG | GUGGG |
| | | GTGTT | GUGUU |
| | | T1AGG | UUAGG |
| | Exon 6 SA 2 | GTGAC | GUGAC |
| | | TGTGG | UGUGG |
| | | GGTGT | GGUGU |
| | | TTTAG | UUUAG |
| | Exon 6 SA 3 | GGTGA | GGUGA |
| | | CTGTG | CUGUG |
| | | GGGTG | GGGUG |
| | | TTTTA | UUUUA |
| | Exon 6 SA 4 | AGG1G | AGGUG |
| | | AC1G1 | ACUGU |
| | | GGGG1 | GGGGU |
| | | GTT1T | GUUUU |
| | Exon 7 SA 1 | AATCT | AAUCU |
| | | GAGCA | GAGCA |
| | | CAGAG | CAGAG |
| | | TGGAA | UGGAA |
| | Exon 7 SA 2 | TGAAG | UGAAG |
| | | AATCT | AAUCU |
| | | GAGCA | GAGCA |
| | | CAGAG | CAGAG |
| | Exon 10 SA | TGATT | UGAUU |
| | | GGACC | GGACC |
| | | TTGGG | UUGGG |
| | | GAGAA | GAGAA |
| | Exon USA 1 | GTGGA | GUGGA |
| | | TCTGA | UCUGA |
| | | AAGAC | AAGAC |
| | | GAGGT | GAGGU |
| | Exon 11 SA 2 | CGTGG | CGUGG |
| | | ATCTG | AUCUG |
| | | AAAGA | AAAGA |
| | | CGAGG | CGAGG |
| | Exon 12 SD | CTGTA | CUGUA |
| | | CCCGC | CCCGC |
| | | AGAGC | AGAGC |
| | | CTCAG | CUCAG |
| | Exon 15 SA | AATCG | AAUCG |
| | | GAGCC | GAGCC |
| | | TGAGA | UGAGA |
| | | CAAAG | CAAAG |
| | Exon 16 SD | ACTTA | ACUUA |
| | | CCTCC | CCUCC |
| | | TCCCC | UCCCC |
| | | ATCTT | AUCUU |
| | Exon 17 SA | AACCT | AACCU |
| | | AGGAG | AGGAG |
| | | TGGAG | UGGAG |
| | | AAGAC | AAGAC |
| | Exon 18 SA | AGAGG | AGAGG |
| | | CATCC | CAUCC |
| | | TGGAG | UGGAG |
| | | AGTTC | AGUUC |
| | Exon 20 SA | CCCAC | CCCAC |
| | | AGATC | AGAUC |
| | | TGAGA | UGAGA |
| | | GGAGG | GGAGG |
| | Exon 21 SA 1 | TTAGG | UUAGG |
| | | TCTGG | UCUGG |
| | | GGACG | GGACG |
| | | AAGTA | AAGUA |
| | Exon 21 SA 2 | CTTAG | CUUAG |
| | | GTCTG | GUCUG |
| | | GGGAC | GGGAC |
| | | GAAGT | GAAGU |
| | Exon 22 SA | TGTGG | UGUGG |
| | | TGCTA | UGCUA |
| | | TAGGA | UAGGA |
| | | GGCCA | GGCCA |
| | Iso SA | GACCC | GACCC |
| | | TGGAA | UGGAA |
| | | GAGTT | GAGUU |
| | | GGGGC | GGGGC |
| DGKZ | Exon 3 SA | CTGAC | CUGAC |
| | | TCCTA | UCCUA |
| | | GCCAC | GCCAC |
| | | GGGAT | GGGAU |
| | Exon 4 SA | CTGCT | CUGCU |
| | | GCAGG | GCAGG |
| | | ACAGG | ACAGG |
| | | AAGAG | AAGAG |
| | Exon 5 SD | ACTTA | ACUUA |
| | | CCTCG | CCUCG |
| | | CGGAC | CGGAC |
| | | ATTCC | AUUCC |
| | Exon 6 SA 1 | AAGGT | AAGGU |
| | | TGGCT | UGGCU |
| | | GGGGG | GGGGG |
| | | AGAAG | AGAAG |
| | Exon 6 SA 2 | AAAGG | AAAGG |
| | | TTGGC | UUGGC |
| | | TGGGG | UGGGG |
| | | GAGAA | GAGAA |
| | Exon 7 SA 1 | ATCCC | AUCCC |
| | | TGAGG | UGAGG |
| | | GTAGA | GUAGA |
| | | CAGGA | CAGGA |
| | Exon 7 SA 2 | TGGAA | UGGAA |
| | | TCCCT | UCCCU |
| | | GAGGG | GAGGG |
| | | TAGAC | UAGAC |
| | Exon 8 SA 1 | GTGGT | GUGGU |
| | | ACTGA | ACUGA |
| | | GGAGA | GGAGA |
| | | GCGAG | GCGAG |
| | Exon 8 SA 2 | TGTGG | UGUGG |
| | | TACTG | UACUG |
| | | AGGAG | AGGAG |
| | | AGCGA | AGCGA |
| | Exon 8 SA 3 | CTGTG | CUGUG |
| | | GTACT | GUACU |
| | | GAGGA | GAGGA |
| | | GAGCG | GAGCG |
| | Exon 8 SD 1 | AGTAC | AGUAC |
| | | TCACC | UCACC |
| | | TGGGG | UGGGG |
| | | CCTCC | CCUCC |
| | Exon 9 SA 1 | GTATT | GUAUU |
| | | CTGCA | CUGCA |
| | | AGGGA | AGGGA |
| | | AGCAG | AGCAG |
| | Exon 9 SA 2 | AGTAT | AGUAU |
| | | TCTGC | UCUGC |
| | | AAGGG | AAGGG |
| | | AAGCA | AAGCA |
| | Exon 9 SA 3 | GAGTA | GAGUA |
| | | TTCTG | UUCUG |
| | | CAAGG | CAAGG |
| | | GAAGC | GAAGC |
| | Exon 10 SA | CTCCT | CUCCU |
| | | GGGAG | GGGAG |
| | | ACAAG | ACAAG |
| | | GTGAG | GUGAG |
| | Exon 11 SA | TTTGC | UUUGC |
| | | ACCCT | ACCCU |
| | | GGATG | GGAUG |
| | | GGATG | GGAUG |
| | Exon 12 SA | AGCCT | AGCCU |
| | | GGGCT | GGGCU |
| | | CATGG | CAUGG |
| | | GAAGA | GAAGA |
| | Exon 13 SD 1 | GCTTA | GCUUA |
| | | CCCCA | CCCCA |
| | | CCCCA | CCCCA |
| | | GTTGA | GUUGA |
| | Exon 13 SD 2 | TGCTT | UGCUU |
| | | ACCCC | ACCCC |
| | | ACCCC | ACCCC |
| | | AGTTG | AGUUG |
| | Exon 14 SA 1 | TAGCC | UAGCC |
| | | CTGGG | CUGGG |
| | | GGAGC | GGAGC |
| | | AGGCA | AGGCA |
| | Exon 14 SA 2 | GTAGC | GUAGC |
| | | CCTGG | CCUGG |
| | | GGGAG | GGGAG |
| | | CAGGC | CAGGC |
| | Exon 15 SA 1 | GGCAA | GGCAA |
| | | CTGGA | CUGGA |
| | | AAAAG | AAAAG |
| | | GTCAA | GUCAA |
| | Exon 15 SA 2 | GGGCA | GGGCA |
| | | ACTGG | ACUGG |
| | | AAAAA | AAAAA |
| | | GGTCA | GGUCA |
| | Exon 15 SD | GCTGC | GCUGC |
| | | CAACC | CAACC |
| | | TCGAG | UCGAG |
| | | ACTCG | ACUCG |
| | Exon 17 SA 1 | AGCTG | AGCUG |
| | | TCTGT | UCUGU |
| | | GGGAG | GGGAG |
| | | ACAGA | ACAGA |
| | Exon 17 SA 2 | AAGCT | AAGCU |
| | | GTCTG | GUCUG |
| | | TGGGA | UGGGA |
| | | GACAG | GACAG |
| | Exon 17 SD | CTCCT | CUCCU |
| | | CACCT | CACCU |
| | | GGGGA | GGGGA |
| | | TGTTC | UGUUC |
| | Exon 18 SD | CCCAC | CCCAC |
| | | TCACC | UCACC |
| | | AACGA | AACGA |
| | | CGTCA | CGUCA |
| | Exon 19 SD 1 | GTACT | GUACU |
| | | CGCTG | CGCUG |
| | | TGCAG | UGCAG |
| | | GGGGG | GGGGG |
| | Exon 19 SD 2 | GACGT | GACGU |
| | | ACTCG | ACUCG |
| | | CTGTG | CUGUG |
| | | CAGGG | CAGGG |
| | Exon 19 SD 3 | GGACG | GGACG |
| | | TACTC | UACUC |
| | | GCTGT | GCUGU |
| | | GCAGG | GCAGG |
| | Exon 19 SD 4 | GGGAC | GGGAC |
| | | GTACT | GUACU |
| | | CGCTG | CGCUG |
| | | TGCAG | UGCAG |
| | Exon 20 SA | TGCTG | UGCUG |
| | | GCTGT | GCUGU |
| | | CGGGC | CGGGC |
| | | AGGGC | AGGGC |
| | Exon 22 SA | GCTCC | GCUCC |
| | | TGTTG | UGUUG |
| | | AGAGA | AGAGA |
| | | AGCAA | AGCAA |
| | Exon 23 SA | AGTGG | AGUGG |
| | | TGGCT | UGGCU |
| | | GTGGG | GUGGG |
| | | AGAGA | AGAGA |
| | Exon 24 SA 1 | GCTCC | GCUCC |
| | | TGTGG | UGUGG |
| | | GGGGA | GGGGA |
| | | GGTCA | GGUCA |
| | Exon 24 SA 2 | TGCTC | UGCUC |
| | | CTGTG | CUGUG |
| | | GGGGG | GGGGG |
| | | AGGTC | AGGUC |
| | Exon 24 SD | TCACC | UCACC |
| | | GGGGC | GGGGC |
| | | GTGGG | GUGGG |
| | | TGAGC | UGAGC |
| | Exon 27 SA | GGAGC | GGAGC |
| | | TGAGG | UGAGG |
| | | GCAGG | GCAGG |
| | | AGGCA | AGGCA |
| | Exon 27 SD | CCGGC | CCGGC |
| | | TCACC | UCACC |
| | | GTGGT | GUGGU |
| | | CCAGC | CCAGC |
| | Exon 28 SA 1 | GGGGG | GGGGG |
| | | CTGGA | CUGGA |
| | | GAAGG | GAAGG |
| | | GGAGG | GGAGG |
| | Exon 28 SA 2 | TGGGG | UGGGG |
| | | GGGCT | GGGCU |
| | | GGAGA | GGAGA |
| | | AGGGG | AGGGG |
| | Exon 29 SA 1 | CCCGC | CCCGC |
| | | TGGGG | UGGGG |
| | | GAGCA | GAGCA |
| | | GGGGC | GGGGC |
| | Exon 29 SA 2 | TCTCC | UCUCC |
| | | CCGCT | CCGCU |
| | | GGGGG | GGGGG |
| | | AGCAG | AGCAG |
| | iso exon 18 SA 1 | ACACT | ACACU |
| | | GGAGG | GGAGG |
| | | CGGGC | CGGGC |
| | | GGGGA | GGGGA |
| | iso exon 18 SA 2 | CACAC | CACAC |
| | | TGGAG | UGGAG |
| | | GCGGG | GCGGG |
| | | CGGGG | CGGGG |
| | iso exon 18 SA 3 | CATCA | CAUCA |
| | | CACTG | CACUG |
| | | GAGGC | GAGGC |
| | | GGGCG | GGGCG |
| | Isoform exon | CTACG | CUACG |
| | 1/2 SD | CGAGC | CGAGC |
| | | AGGGC | AGGGC |
| | | GCTCC | GCUCC |
| | Isoform | TGGCT | UGGCU |
| | exon 2 SA | GTTGG | GUUGG |
| | | GCACA | GCACA |
| | | GAGAC | GAGAC |
| | Isoform | ACTGA | ACUGA |
| | exon 4 SA | CTTCT | CUUCU |
| | | GCTGC | GCUGC |
| | | AGGAC | AGGAC |
| DHX37 | Exon 1 ATG 1 | TCCCC | UCCCC |
| | | ATGGC | AUGGC |
| | | GACTA | GACUA |
| | | GGCCA | GGCCA |
| | Exon 1 ATG 2 | TTCCC | UUCCC |
| | | CATGG | CAUGG |
| | | CGACT | CGACU |
| | | AGGCC | AGGCC |
| | Exon 4 SD 1 | GAACC | GAACC |
| | | TGCAT | UGCAU |
| | | TTCCG | UUCCG |
| | | GGGAG | GGGAG |
| | Exon 4 SD 2 | GTGGC | GUGGC |
| | | GAACC | GAACC |
| | | TGCAT | UGCAU |
| | | TTCCG | UUCCG |
| | Exon 5 SA | TCACT | UCACU |
| | | GGGGG | GGGGG |
| | | AGGAA | AGGAA |
| | | GAACA | GAACA |
| | Exon 7 SA 1 | ACCCT | ACCCU |
| | | GTATG | GUAUG |
| | | GGCAG | GGCAG |
| | | AGTTC | AGUUC |
| | Exon 7 SA 2 | GACCC | GACCC |
| | | TGTAT | UGUAU |
| | | GGGCA | GGGCA |
| | | GAGTT | GAGUU |
| | Exon 8 SA 1 | AAGTC | AAGUC |
| | | CTGGG | CUGGG |
| | | GGGAG | GGGAG |
| | | GTCCG | GUCCG |
| | Exon 8 SA 2 | GAAGT | GAAGU |
| | | CCTGG | CCUGG |
| | | GGGGA | GGGGA |
| | | GGTCC | GGUCC |
| | Exon 8 SA 3 | GGAAG | GGAAG |
| | | TCCTG | UCCUG |
| | | GGGGG | GGGGG |
| | | AGGTC | AGGUC |
| | Exon 9 SA | AGGTT | AGGUU |
| | | CCTCT | CCUCU |
| | | GCAAA | GCAAA |
| | | AGGAC | AGGAC |
| | Exon 9 SD 1 | GTTAC | GUUAC |
| | | CTTGA | CUUGA |
| | | TGACC | UGACC |
| | | GGCGG | GGCGG |
| | Exon 9 SD 2 | TGTGT | UGUGU |
| | | TACCT | UACCU |
| | | TGATG | UGAUG |
| | | ACCGG | ACCGG |
| | Exon 10 SA 1 | CACCT | CACCU |
| | | GTGGG | GUGGG |
| | | ACGCC | ACGCC |
| | | CAGGA | CAGGA |
| | Exon 10 SA 2 | ATTCC | AUUCC |
| | | ACCTG | ACCUG |
| | | TGGGA | UGGGA |
| | | CGCCC | CGCCC |
| | Exon 10 SD | CCTCA | CCUCA |
| | | CCTGC | CCUGC |
| | | GGGCA | GGGCA |
| | | GCATC | GCAUC |
| | Exon USA 1 | ATGCC | AUGCC |
| | | ACCTG | ACCUG |
| | | TGGAA | UGGAA |
| | | AGAAT | AGAAU |
| | Exon 11 SA 2 | GATGC | GAUGC |
| | | CACCT | CACCU |
| | | GTGGA | GUGGA |
| | | AAGAA | AAGAA |
| | Exon 11 SD | TTTAC | UUUAC |
| | | CTTGT | CUUGU |
| | | GGCCG | GGCCG |
| | | GGCTC | GGCUC |
| | Exon 12 SA 1 | TTTCT | UUUCU |
| | | GGGAG | GGGAG |
| | | AGGGG | AGGGG |
| | | CAGGT | CAGGU |
| | Exon 12 SA 2 | TCCTT | UCCUU |
| | | TTCTG | UUCUG |
| | | GGAGA | GGAGA |
| | | GGGGC | GGGGC |
| | Exon 14 SA | CTCAC | CUCAC |
| | | CTGGA | CUGGA |
| | | GGGAA | GGGAA |
| | | AGCAG | AGCAG |
| | Exon 14 SD 1 | TTACC | UUACC |
| | | TGTGC | UGUGC |
| | | TTGCT | UUGCU |
| | | TCTCT | UCUCU |
| | Exon 14 SD 2 | GTTAC | GUUAC |
| | | CTGTG | CUGUG |
| | | CTTGC | CUUGC |
| | | TTCTC | UUCUC |
| | Exon 15 SA 1 | AAGAC | AAGAC |
| | | CTAGG | CUAGG |
| | | ATTCG | AUUCG |
| | | GGGAA | GGGAA |
| | Exon 15 SA 2 | AAAGA | AAAGA |
| | | CCTAG | CCUAG |
| | | GATTC | GAUUC |
| | | GGGGA | GGGGA |
| | Exon 15 SD 1 | ACCCA | ACCCA |
| | | CCTGT | CCUGU |
| | | AGCAG | AGCAG |
| | | TGGCC | UGGCC |
| | Exon 15 SD 2 | GACCC | GACCC |
| | | ACCTG | ACCUG |
| | | TAGCA | UAGCA |
| | | GTGGC | GUGGC |
| | Exon 16 SA 1 | AGCCT | AGCCU |
| | | GGATG | GGAUG |
| | | GAGAG | GAGAG |
| | | AAACC | AAACC |
| | Exon 16 SA 2 | CAGCC | CAGCC |
| | | TGGAT | UGGAU |
| | | GGAGA | GGAGA |
| | | GAAAC | GAAAC |
| | Exon 17 SD 1 | CCTTA | CCUUA |
| | | CCTTT | CCUUU |
| | | CTGCT | CUGCU |
| | | TTCTG | UUCUG |
| | Exon 17 SD 2 | GCCTT | GCCUU |
| | | ACCTT | ACCUU |
| | | TCTGC | UCUGC |
| | | TTTCT | UUUCU |
| | Exon 17 SD 3 | GGCCT | GGCCU |
| | | TACCT | UACCU |
| | | TTCTG | UUCUG |
| | | CTTTC | CUUUC |
| | Exon 18 SA 1 | CACCC | CACCC |
| | | TGGAG | UGGAG |
| | | ATGGA | AUGGA |
| | | GGTGG | GGUGG |
| | Exon 18 SA 2 | CTTCA | CUUCA |
| | | CCCTG | CCCUG |
| | | GAGAT | GAGAU |
| | | GGAGG | GGAGG |
| | Exon 19 SD | ACAAA | ACAAA |
| | | CCCAG | CCCAG |
| | | CAGCA | CAGCA |
| | | CCATG | CCAUG |
| | Exon 20 SA 1 | GCGCC | GCGCC |
| | | TGGGG | UGGGG |
| | | AACGA | AACGA |
| | | AGAGG | AGAGG |
| | Exon 20 SA 2 | GGCGC | GGCGC |
| | | CTGGG | CUGGG |
| | | GAACG | GAACG |
| | | AAGAG | AAGAG |
| | Exon 20 SA 3 | CGGCG | CGGCG |
| | | CCTGG | CCUGG |
| | | GGAAC | GGAAC |
| | | GAAGA | GAAGA |
| | Exon 20 SA 4 | ACGGC | ACGGC |
| | | GCCTG | GCCUG |
| | | GGGAA | GGGAA |
| | | CGAAG | CGAAG |
| | Exon 20 SD | CCGTA | CCGUA |
| | | CCTGC | CCUGC |
| | | GGTGG | GGUGG |
| | | TCAGC | UCAGC |
| | Exon 23 SA | AGACG | AGACG |
| | | CCTGG | CCUGG |
| | | GGGCC | GGGCC |
| | | GGGGG | GGGGG |
| | Exon 24 SD | ACTCA | ACUCA |
| | | CAGAA | CAGAA |
| | | CACGC | CACGC |
| | | TGGCC | UGGCC |
| | Exon 25 SD | CACCT | CACCU |
| | | ACCTG | ACCUG |
| | | CCCTT | CCCUU |
| | | CCAGC | CCAGC |
| | Exon 26 SA | AAGAC | AAGAC |
| | | CTGAT | CUGAU |
| | | GAGAG | GAGAG |
| | | ACCAC | ACCAC |
| | Exon 28 SA | GCAGG | GCAGG |
| | | TCTGC | UCUGC |
| | | AGGGG | AGGGG |
| | | AGGGA | AGGGA |
| ELOB | Ex2 SA1 | ACGTC | ACGUC |
| (TCEB2) | (Pos 6) | CTGGG | CUGGG |
| | | GGCGG | GGCGG |
| | | CGGGC | CGGGC |
| | Ex3 SA1 | GTCAT | GUCAU |
| | (Pos 7) | CCTGA | CCUGA |
| | | GGAGA | GGAGA |
| | | GAAGC | GAAGC |
| | Ex4 SD1 | TCACT | UCACU |
| | (Pos 4) | GCACG | GCACG |
| | | GCTTG | GCUUG |
| | | TTCAT | UUCAU |
| | Ex5 SA1 | ATGCA | AUGCA |
| | (Pos 8) | GGCTA | GGCUA |
| | | TGGGG | UGGGG |
| | | GTGGG | GUGGG |
| | Ex5 SA2 | CATGC | CAUGC |
| | (Pos 9) | AGGCT | AGGCU |
| | | ATGGG | AUGGG |
| | | GGTGG | GGUGG |
| | Isoform ATG | GTCTT | GUCUU |
| | | TTTCA | UUUCA |
| | | TTGAC | UUGAC |
| | | TAGAA | UAGAA |
| | Exon 2 SD | TGACT | UGACU |
| | | TACCT | UACCU |
| | | TAACG | UAACG |
| | | TTTTC | UUUUC |
| | Exon 3 STOP | TGCAT | UGCAU |
| | | CAAGT | CAAGU |
| | | AGAAG | AGAAG |
| | | AATGC | AAUGC |
| | Isoform 2 ATG | CTCTT | CUCUU |
| | | TCCAT | UCCAU |
| | | GCAAT | GCAAU |
| | | CAGTC | CAGUC |
| | Exon 4 STOP | GTTCA | GUUCA |
| | | GAAAG | GAAAG |
| | | TAAAT | UAAAU |
| | | GAAAT | GAAAU |
| ENTPD1 | Isoform 3 ATG | TCACT | UCACU |
| (CD39) | | TTCCA | UUCCA |
| | | TCCTG | UCCUG |
| | | TACAA | UACAA |
| | Exon 5 STOP | GGCCA | GGCCA |
| | | AGAGG | AGAGG |
| | | AAGGT | AAGGU |
| | | GCCTA | GCCUA |
| | Exon 6 STOP 1 | GCTCT | GCUCU |
| | | GCAAT | GCAAU |
| | | TTCGC | UUCGC |
| | | CTCTA | CUCUA |
| | Exon 6 STOP 2 | ACTCT | ACUCU |
| | | GGCAG | GGCAG |
| | | AAACT | AAACU |
| | | GGCCA | GGCCA |
| | Exon 6 SD | TATAC | UAUAC |
| | | TTGCC | UUGCC |
| | | TGAAT | UGAAU |
| | | GTCCT | GUCCU |
| | Exon 7 SD | AACTT | AACUU |
| | | ACCCC | ACCCC |
| | | AAAAT | AAAAU |
| | | CCCCC | CCCCC |
| | Exon 8 STOP | CTGTG | CUGUG |
| | | CTCAG | CUCAG |
| | | CCTTG | CCUUG |
| | | GGAGG | GGAGG |
| | Exon 9 SA 4 | TTTTA | UUUUA |
| | | TCTAG | UCUAG |
| | | AAGTG | AAGUG |
| | | AAGTG | AAGUG |
| | Exon 9 SA 3 | TTTAT | UUUAU |
| | | CTAGA | CUAGA |
| | | AGTGA | AGUGA |
| | | AGTGA | AGUGA |
| | Exon 9 SA 2 | TTATC | UUAUC |
| | | TAGAA | UAGAA |
| | | GTGAA | GUGAA |
| | | GTGAG | GUGAG |
| | Exon 9 SA 1 | TATCT | UAUCU |
| | | AGAAG | AGAAG |
| | | TGAAG | UGAAG |
| | | TGAGG | UGAGG |
| | Exon 9 SD | AAATT | AAAUU |
| | | ACCTT | ACCUU |
| | | GCCAA | GCCAA |
| | | TGAAA | UGAAA |
| FADD | Exon 1 SD | CCCAC | CCCAC |
| | | CTTCT | CUUCU |
| | | TCCCC | UCCCC |
| | | AGGCG | AGGCG |
| | Exon 1 STOP | GAGCA | GAGCA |
| | | GAACG | GAACG |
| | | ACCTG | ACCUG |
| | | GAGCC | GAGCC |
| | Exon 2 STOP 1 | GTCCT | GUCCU |
| | | GCCAG | GCCAG |
| | | ATGAA | AUGAA |
| | | CCTGG | CCUGG |
| | Exon 2 STOP 2 | CCTGG | CCUGG |
| | | TACAA | UACAA |
| | | GAGGT | GAGGU |
| | | TCAGC | UCAGC |
| | Exon 2 STOP 3 | GTGAC | GUGAC |
| | | CTCCA | CUCCA |
| | | GAACA | GAACA |
| | | GGAGT | GGAGU |
| | Exon 2 STOP 4 | TGACC | UGACC |
| | | TCCAG | UCCAG |
| | | AACAG | AACAG |
| | | GAGTG | GAGUG |
| | Exon 2 STOP 5 | GTTCC | GUUCC |
| | | ATGAC | AUGAC |
| | | ATCGG | AUCGG |
| | | GGACA | GGACA |
| IL6 | Exon 1 ATG | GGAGT | GGAGU |
| | | TCATA | UCAUA |
| | | GCTGG | GCUGG |
| | | GCTCC | GCUCC |
| | Exon 2 SD | CCTAC | CCUAC |
| | | CCACC | CCACC |
| | | TCCTT | UCCUU |
| | | TCTCA | UCUCA |
| | Exon 3 SD | GTACC | GUACC |
| | | TCATT | UCAUU |
| | | GAATC | GAAUC |
| | | CAGAT | CAGAU |
| | Exon 3 STOP | CTTCC | CUUCC |
| | | AATCT | AAUCU |
| | | GGATT | GGAUU |
| | | CAATG | CAAUG |
| | Exon 4 SA 1 | CTCCT | CUCCU |
| | | AAGAG | AAGAG |
| | | GAAAG | GAAAG |
| | | ATGGT | AUGGU |
| | Exon 4 SA 2 | TCTCC | UCUCC |
| | | TAAGA | UAAGA |
| | | GGAAA | GGAAA |
| | | GATGG | GAUGG |
| | Exon 4 SA 3 | AAGTC | AAGUC |
| | | TCCTA | UCCUA |
| | | AGAGG | AGAGG |
| | | AAAGA | AAAGA |
| | Exon 4 SD | CCACC | CCACC |
| | | TTTTT | UUUUU |
| | | CTGCA | CUGCA |
| | | GGAAC | GGAAC |
| | Exon 5 STOP 1 | AGCTG | AGCUG |
| | | CAGGC | CAGGC |
| | | ACAGA | ACAGA |
| | | ACCAG | ACCAG |
| | Exon 5 STOP 2 | GGCAC | GGCAC |
| | | AGAAC | AGAAC |
| | | CAGTG | CAGUG |
| | | GCTGC | GCUGC |
| | Exon 5 STOP 3 | GTTCC | GUUCC |
| | | TGCAG | UGCAG |
| | | TCCAG | UCCAG |
| | | CCTGA | CCUGA |
| | Iso 1 Exon 2 SD | TGGGG | UGGGG |
| | | GTACT | GUACU |
| | | GGGGC | GGGGC |
| | | AGGGA | AGGGA |
| | Iso 1 Exon 4 | ATTCC | AUUCC |
| | STOP | CTCAA | CUCAA |
| | | CTTGG | CUUGG |
| | | TGTGG | UGUGG |
| IL6R | Exon 1 ATG | CGGCC | CGGCC |
| | | AGCAT | AGCAU |
| | | GCTTC | GCUUC |
| | | CTCCT | CUCCU |
| | Exon 4 SA | TGACT | UGACU |
| | | GTTAG | GUUAG |
| | | ACACA | ACACA |
| | | AAACA | AAACA |
| | Exon 4 STOP 1 | CTCCT | CUCCU |
| | | GCCAG | GCCAG |
| | | TTAGC | UUAGC |
| | | AGTCC | AGUCC |
| | Exon 4 STOP 2 | ACTCA | ACUCA |
| | | AACCT | AACCU |
| | | TTCAG | UUCAG |
| | | GGTTG | GGUUG |
| | Exon 5 STOP | CCTGG | CCUGG |
| | | CAAGA | CAAGA |
| | | CCCCC | CCCCC |
| | | ACTCC | ACUCC |
| | Exon 6 SA | TTGAC | UUGAC |
| | | CTGAG | CUGAG |
| | | GGCGG | GGCGG |
| | | GGGCA | GGGCA |
| | Exon 6 STOP 1 | CGTGG | CGUGG |
| | | TGCAG | UGCAG |
| | | CTTCG | CUUCG |
| | | TGCCC | UGCCC |
| | Exon 6 STOP 2 | ACCTG | ACCUG |
| | | TCCAA | UCCAA |
| | | GGCGT | GGCGU |
| | | GCCCA | GCCCA |
| | Exon 7 STOP | CTGGG | CUGGG |
| | | TCCCA | UCCCA |
| | | AATGC | AAUGC |
| | | CACCC | CACCC |
| | Exon 8 SA | GGATT | GGAUU |
| | | CTGCG | CUGCG |
| | | GACAG | GACAG |
| | | AAGAA | AAGAA |
| | Exon 8 SD | GGAGC | GGAGC |
| | | TCACC | UCACC |
| | | TGCAT | UGCAU |
| | | GGGGG | GGGGG |
| IL10 | Exon 2 SA | TTTGC | UUUGC |
| | | TGCAG | UGCAG |
| | | GAAGA | GAAGA |
| | | ACAAA | ACAAA |
| | Exon2 STOP | GCAGC | GCAGC |
| | | AAATG | AAAUG |
| | | AAGGA | AAGGA |
| | | TCAGC | UCAGC |
| | Exon 3 SA | ACCCT | ACCCU |
| | | AAGGG | AAGGG |
| | | CAGGA | CAGGA |
| | | GCCAA | GCCAA |
| | Exon 3 STOP 1 | GATGA | GAUGA |
| | | TCCAG | UCCAG |
| | | TTTTA | UUUUA |
| | | CCTGG | CCUGG |
| | Exon 3 STOP 2 | GAACC | GAACC |
| | | AAGAC | AAGAC |
| | | CCAGA | CCAGA |
| | | CATCA | CAUCA |
| IL10RA | Ex 5 STOP | CCAGG | CCAGG |
| | (pos 6) | CAGTG | CAGUG |
| | | TGAGT | UGAGU |
| | | CAGCT | CAGCU |
| | Ex 6 STOP | TGGCC | UGGCC |
| | (pos 9) | CTCCA | CUCCA |
| | | GCTGT | GCUGU |
| | | ATGTG | AUGUG |
| | Ex2 STOP | CTTCA | CUUCA |
| | (pos 8) | AACCA | AACCA |
| | | CACAG | CACAG |
| | | ACGGA | ACGGA |
| | Ex2 STOP | TGGGT | UGGGU |
| | (pos 8) | GTCCA | GUCCA |
| | | GTGGA | GUGGA |
| | | GGATG | GGAUG |
| | Ex2 STOP | GCTTC | GCUUC |
| | (pos 9) | AAACC | AAACC |
| | | ACACA | ACACA |
| | | GACGG | GACGG |
| | Ex3 SA | TCCAT | UCCAU |
| | (pos 8) | ACCTG | ACCUG |
| | | AGGAG | AGGAG |
| | | ATACC | AUACC |
| | Ex3 STOP | TGACG | UGACG |
| | (pos 8) | GTCCA | GUCCA |
| | | GTTGG | GUUGG |
| | | AGTGC | AGUGC |
| | Ex4 SD | CCCCA | CCCCA |
| | (pos 8) | TACCG | UACCG |
| | | TGAAG | UGAAG |
| | | TTTCC | UUUCC |
| | Ex5 SD | TGACT | UGACU |
| | (pos 8) | CACAC | CACAC |
| | | TGCCT | UGCCU |
| | | GGTGA | GGUGA |
| | Ex5 SD | CTGAC | CUGAC |
| | (pos 9) | TCACA | UCACA |
| | | CTGCC | CUGCC |
| | | TGGTG | UGGUG |
| | Ex5 STOP | ACCAG | ACCAG |
| | (pos 7) | GCAGT | GCAGU |
| | | GTGAG | GUGAG |
| | | TCAGC | UCAGC |
| | Ex7 SA | TTGAA | UUGAA |
| | (pos 9) | GAGCT | GAGCU |
| | | GGGGA | GGGGA |
| | | AGAGA | AGAGA |
| | Ex7 STOP | AGCTC | AGCUC |
| | (pos 5) | CAGTC | CAGUC |
| | | AGATA | AGAUA |
| | | TTCCC | UUCCC |
| | Ex7 STOP | AGTTC | AGUUC |
| | (pos 5) | AAAAC | AAAAC |
| | | TCTGA | UCUGA |
| | | GGGCC | GGGCC |
| | Ex7 STOP | TAGTT | UAGUU |
| | (pos 6) | CAAAA | CAAAA |
| | | CTCTG | CUCUG |
| | | AGGGC | AGGGC |
| | Ex7 STOP | CTGGT | CUGGU |
| | (pos 7) | TCCAC | UCCAC |
| | | TGTCC | UGUCC |
| | | CGTTG | CGUUG |
| | Ex7 STOP | GCTGG | GCUGG |
| | (pos 8) | TTCCA | UUCCA |
| | | CTGTC | CUGUC |
| | | CCGTT | CCGUU |
| | Ex7 STOP | TGGCA | UGGCA |
| | (pos 9) | TTCCA | UUCCA |
| | | GGGTT | GGGUU |
| | | ACCTG | ACCUG |
| | Ex7 STOP | GGCTG | GGCUG |
| | (pos 9) | GTTCC | GUUCC |
| | | ACTGT | ACUGU |
| | | CCCGT | CCCGU |
| IRF4 | Exon 1 SD | GCCGG | GCCGG |
| | (pos 9) | AGACC | AGACC |
| | | TTGAA | UUGAA |
| | | GAGCG | GAGCG |
| | Exon 1 STOP 1 | GGCGG | GGCGG |
| | (pos 7) | CCGAG | CCGAG |
| | | GCGGA | GCGGA |
| | | GAGTT | GAGUU |
| | Exon 1 STOP 2 | CGTTC | CGUUC |
| | (pos 8/9) | TCCCA | UCCCA |
| | | CACCA | CACCA |
| | | GCCCG | GCCCG |
| | Exon 1 STOP 3 | CGCGG | CGCGG |
| | (pos 5) | TTGTA | UUGUA |
| | | GTCCT | GUCCU |
| | | GCTTG | GCUUG |
| | Exon 2 SD 1 | CTACC | CUACC |
| | | TTTTT | UUUUU |
| | | TGGCT | UGGCU |
| | | CCCTC | CCCUC |
| | Exon 2 STOP 1 | GTCTT | GUCUU |
| | | CCAGG | CCAGG |
| | | TGGGA | UGGGA |
| | | GGGTC | GGGUC |
| | Exon 3 SA 1 | CTCCT | CUCCU |
| | | ACATG | ACAUG |
| | | TTTGG | UUUGG |
| | | GGAAA | GGAAA |
| | Exon 3 SD 1 | ATACC | AUACC |
| | | TGGGC | UGGGC |
| | | TGGGA | UGGGA |
| | | GCGAA | GCGAA |
| | Exon 3 SD 2 | CATAC | CAUAC |
| | | CTGGG | CUGGG |
| | | CTGGG | CUGGG |
| | | AGCGA | AGCGA |
| | Exon 3 STOP 1 | AGCCA | AGCCA |
| | | AGCAG | AGCAG |
| | | CTCAC | CUCAC |
| | | CCTGG | CCUGG |
| | Exon 3 STOP 2 | CCCAG | CCCAG |
| | | CCCAG | CCCAG |
| | | GTATG | GUAUG |
| | | GTGGA | GUGGA |
| | Exon 4 SA 1 | CTGCT | CUGCU |
| | | AAAGG | AAAGG |
| | | AGTGC | AGUGC |
| | | AGGAG | AGGAG |
| | Exon 4 SD 1 | TCCTT | UCCUU |
| | | ACCAT | ACCAU |
| | | TTTCA | UUUCA |
| | | CAAGC | CAAGC |
| | Exon 4 SD 2 | CCTTA | CCUUA |
| | | CCATT | CCAUU |
| | | TTCAC | UUCAC |
| | | AAGCT | AAGCU |
| | Exon 4 STOP 1 | AGTCC | AGUCC |
| | | CTCCA | CUCCA |
| | | GCTTC | GCUUC |
| | | GGTCG | GGUCG |
| | Exon 4 STOP 2 | GTCCC | GUCCC |
| | | TCCAG | UCCAG |
| | | CTTCG | CUUCG |
| | | GTCGA | GUCGA |
| | Exon 4 STOP 3 | TCCCT | UCCCU |
| | | CCAGC | CCAGC |
| | | TTCGG | UUCGG |
| | | TCGAG | UCGAG |
| | Exon 4 STOP 4 | TACCA | UACCA |
| | | ATGTC | AUGUC |
| | | CCATG | CCAUG |
| | | ACGTT | ACGUU |
| | Exon 4 STOP 5 | GCCTT | GCCUU |
| | | GCCAG | GCCAG |
| | | TGGTG | UGGUG |
| | | GCCGC | GCCGC |
| | Exon 4 STOP 6 | CCTTG | CCUUG |
| | | CCAGT | CCAGU |
| | | GGTGG | GGUGG |
| | | CCGCG | CCGCG |
| | Exon 5 SD 1 | GCACT | GCACU |
| | | CACCT | CACCU |
| | | GAGAA | GAGAA |
| | | CGCCA | CGCCA |
| | Exon 6 SA 1 | AGTCT | AGUCU |
| | | GCAAA | GCAAA |
| | | CACAG | CACAG |
| | | AGCTC | AGCUC |
| | Exon 6 STOP 1 | TGTGC | UGUGC |
| | | CAGAG | CAGAG |
| | | CAGGA | CAGGA |
| | | TCTAC | UCUAC |
| | Exon 6 STOP 2 | GTGCC | GUGCC |
| | | AGAGC | AGAGC |
| | | AGGAT | AGGAU |
| | | CTACT | CUACU |
| | Exon 6 STOP 3 | GACAC | GACAC |
| | | ACAGC | ACAGC |
| | | AGTTC | AGUUC |
| | | TTGTC | UUGUC |
| | Exon 7 STOP 1 | CTGCA | CUGCA |
| | | AGCGT | AGCGU |
| | | TTGCT | UUGCU |
| | | CACCA | CACCA |
| | Exon 7 STOP 2 | TTCCA | UUCCA |
| | | GGTGA | GGUGA |
| | | CTCTA | CUCUA |
| | | TGCTT | UGCUU |
| IRF8 | Ex1 SA | CCTTC | CCUUC |
| | (Pos 7) | TCATG | UCAUG |
| | | GCAGG | GCAGG |
| | | TGTCC | UGUCC |
| | Ex1 SD | CCCAC | CCCAC |
| | (Pos 5) | AGATT | AGAUU |
| | | CAGGG | CAGGG |
| | | ACTCC | ACUCC |
| | Ex1 SD | ACCCA | ACCCA |
| | (Pos 6) | CAGAT | CAGAU |
| | | TCAGG | UCAGG |
| | | GACTC | GACUC |
| | Ex2 SD | GCTCT | GCUCU |
| | (Pos 9) | TTACC | UUACC |
| | | TTAAA | UUAAA |
| | | AATGG | AAUGG |
| | Ex3 SD | TTACA | UUACA |
| | (Pos 4) | TTTTT | UUUUU |
| | | GCTCT | GCUCU |
| | | TCCTC | UCCUC |
| | Ex4 SA | GAAGG | GAAGG |
| | (Pos 6) | CTGCA | CUGCA |
| | | CAGTC | CAGUC |
| | | AGGGG | AGGGG |
| | Ex4 SA | AAGGC | AAGGC |
| | (Pos 5) | TGCAC | UGCAC |
| | | AGTCA | AGUCA |
| | | GGGGA | GGGGA |
| | Ex4 SA | ACAGA | ACAGA |
| | (Pos 9) | AGGCT | AGGCU |
| | | GCACA | GCACA |
| | | GTCAG | GUCAG |
| | Ex5 SA1 | CACCA | CACCA |
| | (Pos 7) | TCTGG | UCUGG |
| | | GAGAA | GAGAA |
| | | TGCTG | UGCUG |
| | Ex5 SA2 | GGAGA | GGAGA |
| | (Pos 9) | ATGCT | AUGCU |
| | | GTGGA | GUGGA |
| | | CAAGA | CAAGA |
| | Ex5 SD1 | GGTAC | GGUAC |
| | (Pos 9) | AGACC | AGACC |
| | | TCGGA | UCGGA |
| | | AGAAC | AGAAC |
| | Ex5 SD2 | CAGAC | CAGAC |
| | (Pos 5) | CTCGG | CUCGG |
| | | AAGAA | AAGAA |
| | | CTGGC | CUGGC |
| | Ex6 SA1 | CTGCA | CUGCA |
| | (Pos 9) | GCTCT | GCUCU |
| | | GGAAT | GGAAU |
| | | GACAC | GACAC |
| JUNB | Ex1 SA1 | GCACA | GCACA |
| | (Pos 7) | TCCGG | UCCGG |
| | | GCGGC | GCGGC |
| | | CCAGG | CCAGG |
| | Ex1 STOP1 | GGATA | GGAUA |
| | (Pos 9) | CGGCC | CGGCC |
| | | GGGCC | GGGCC |
| | | CCTGG | CCUGG |
| | Ex1 STOP2 | TCTGG | UCUGG |
| | (Pos 7) | TCAGG | UCAGG |
| | | GCTCG | GCUCG |
| | | GACAC | GACAC |
| | Ex1 STOP2 | GGACA | GGACA |
| | (Pos 4) | GTACT | GUACU |
| | | TTTAC | UUUAC |
| | | CCCCG | CCCCG |
| | Ex1 STOP3 | GAGCA | GAGCA |
| | (Pos 4) | GGAGG | GGAGG |
| | | GCTTC | GCUUC |
| | | GCCGA | GCCGA |
| | Ex1 STOP4 | GCGCA | GCGCA |
| | (Pos 4) | GCTGG | GCUGG |
| | | GCTTG | GCUUG |
| | | GGCCG | GGCCG |
| | Ex1 STOP6 | GGAAC | GGAAC |
| | (Pos 8) | CGCAG | CGCAG |
| | | ACCGT | ACCGU |
| | | GCCGG | GCCGG |
| | EX1 STOP7 | CAGCC | CAGCC |
| | (Pos 5) | GGGAC | GGGAC |
| | | GCCAC | GCCAC |
| | | GCCGC | GCCGC |
| | Ex1 STOP8 | AGACC | AGACC |
| | (Pos 5) | AAGAG | AAGAG |
| | | CGCAT | CGCAU |
| | | CAAAG | CAAAG |
| | Ex1 STOP9 | CAAGC | CAAGC |
| | (Pos 5) | GGCTG | GGCUG |
| | | CGGAA | CGGAA |
| | | CCGGC | CCGGC |
| | Ex1 STOP10 | GCGGC | GCGGC |
| | (Pos 8) | TGCGG | UGCGG |
| | | AACCG | AACCG |
| | | GCTGG | GCUGG |
| LAIR-1 | Exon 1 ATG | TCTCT | UCUCU |
| (CD305 | | TTCCA | UUCCA |
| | | TCTTC | UCUUC |
| | | TGTCG | UGUCG |
| | Iso 1 Ex 2 | ATGAC | AUGAC |
| | SD 2 | TTACC | UUACC |
| | | CTCCT | CUCCU |
| | | GCGTG | GCGUG |
| | Iso 1 Ex 2 | CTTAC | CUUAC |
| | SD 1 | CCTCC | CCUCC |
| | | TGCGT | UGCGU |
| | | GTGGA | GUGGA |
| | Exon 2 STOP | TGGGG | UGGGG |
| | | TTCAA | UUCAA |
| | | ACATT | ACAUU |
| | | CCGCC | CCGCC |
| | Exon 3 SA | AGCTT | AGCUU |
| | | TCTGT | UCUGU |
| | | AAACA | AAACA |
| | | GGGGC | GGGGC |
| | Exon 3 SD 1 | TACTG | UACUG |
| | | ACCAG | ACCAG |
| | | CTGAG | CUGAG |
| | | GAGCC | GAGCC |
| | Exon 3 SD 2 | CTACT | CUACU |
| | | GACCA | GACCA |
| | | GCTGA | GCUGA |
| | | GGAGC | GGAGC |
| | Exon 5 SA | CATCT | CAUCU |
| | | AAGAA | AAGAA |
| | | AGACA | AGACA |
| | | GAAAC | GAAAC |
| | Exon 6 SA 1 | GGGGG | GGGGG |
| | | CCCTA | CCCUA |
| | | AGGAC | AGGAC |
| | | AGTCG | AGUCG |
| | Exon 6 SA 2 | GGGGG | GGGGG |
| | | GCCCT | GCCCU |
| | | AAGGA | AAGGA |
| | | CAGTC | CAGUC |
| | Exon 8 SA | TGTCT | UGUCU |
| | | TGGGG | UGGGG |
| | | AGAAA | AGAAA |
| | | ATACA | AUACA |
| | Exon 9 SA | GGCCT | GGCCU |
| | | AAGAG | AAGAG |
| | | GGAGA | GGAGA |
| | | GACCC | GACCC |
| LDHA | Ex0 SD1 | CCCAT | CCCAU |
| | (Pos 7) | ACCTT | ACCUU |
| | | AGCGT | AGCGU |
| | | GGAAA | GGAAA |
| | Ex4 STOP | ACCCA | ACCCA |
| | (Pos 4) | CCCAT | CCCAU |
| | | GACAG | GACAG |
| | | CTTAA | CUUAA |
| | Ex6 SD1 | TAGAC | UAGAC |
| | (Pos 9) | CTACC | CUACC |
| | | TTAAT | UUAAU |
| | | CATGG | CAUGG |
| LIF | Ex2 SA1 | CACAA | CACAA |
| | (Pos 9) | CTCCT | CUCCU |
| | | GGGGA | GGGGA |
| | | CAGTC | CAGUC |
| | Ex2 SD1 | AACTT | AACUU |
| | (Pos 7) | ACATA | ACAUA |
| | | GAGAA | GAGAA |
| | | TAAAG | UAAAG |
| | Ex2 SD2 | ACTTA | ACUUA |
| | (Pos 6) | CATAG | CAUAG |
| | | AGAAT | AGAAU |
| | | AAAGA | AAAGA |
| | Ex2 STOP1 | GAACC | GAACC |
| | (Pos 5) | AGATC | AGAUC |
| | | AGGAG | AGGAG |
| | | CCAAC | CCAAC |
| | Ex4 SA1 | CTGTG | CUGUG |
| | (Pos 8) | TACTG | UACUG |
| | | AGGGG | AGGGG |
| | | CAGAA | CAGAA |
| | Ex4 SA2 | GCTGT | GCUGU |
| | (Pos 9) | GTACT | GUACU |
| | | GAGGG | GAGGG |
| | | GCAGA | GCAGA |
| | Ex4 SA3 | TGTAC | UGUAC |
| | (Pos 5) | TGAGG | UGAGG |
| | | GGCAG | GGCAG |
| | | AAGGG | AAGGG |
| LYN | Ex1 STOP1 | GGTGC | GGUGC |
| | (Pos 8) | TCCCA | UCCCA |
| | | GGAGC | GGAGC |
| | | GGAGG | GGAGG |
| | Ex4 STOP 1 | AGAGG | AGAGG |
| | (Pos 8) | AACAA | AACAA |
| | | GGAGA | GGAGA |
| | | CATTG | CAUUG |
| | Ex5 SD1 | GACTC | GACUC |
| | (Pos 5) | ACTCT | ACUCU |
| | | TCTGT | UCUGU |
| | | TTCTA | UUCUA |
| | Ex6 STOP1 | GAAAG | GAAAG |
| | (Pos 7) | GCAGC | GCAGC |
| | | TTTTG | UUUUG |
| | | GCACC | GCACC |
| | Ex8 STOP1 | AGCCA | AGCCA |
| | (Pos 4) | CAGAA | CAGAA |
| | | GCCAT | GCCAU |
| | | GGGAT | GGGAU |
| | Ex8 STOP2 | CCCCC | CCCCC |
| | (Pos 5) | GGGAG | GGGAG |
| | | TCCAT | UCCAU |
| | | CAAGT | CAAGU |
| | Ex9 SA1 | TAACC | UAACC |
| | (Pos 5) | TAGGA | UAGGA |
| | | AGAAA | AGAAA |
| | | AAAGA | AAAGA |
| | Ex9 SD1 | CTCAC | CUCAC |
| | (Pos 5) | CCTTG | CCUUG |
| | | GCCAT | GCCAU |
| | | GTACT | GUACU |
| | Ex10 SA1 | CCTGA | CCUGA |
| | (Pos 7) | ACTGG | ACUGG |
| | | AGGTG | AGGUG |
| | | AACAA | AACAA |
| | Ex11 SA1 | TGCAA | UGCAA |
| | (Pos 7) | TCTGA | UCUGA |
| | | AAACA | AAACA |
| | | GAAAT | GAAAU |
| | Ex12 SA1 | CACCT | CACCU |
| | (Pos 4) | AAGGA | AAGGA |
| | | AGAAG | AGAAG |
| | | ATATG | AUAUG |
| | Ex13 STOP1 | AGCAG | AGCAG |
| | (Pos 6) | CAGCC | CAGCC |
| | | TTAGA | UUAGA |
| | | GCACA | GCACA |
| MAP4K4 | Ex1 SD1 | CACTC | CACUC |
| | (Pos 7) | ACCCG | ACCCG |
| | | CAGGG | CAGGG |
| | | AGGAG | AGGAG |
| | Ex2 SA1 | AGGAT | AGGAU |
| | (Pos 7) | CCTGG | CCUGG |
| | | AGAGG | AGAGG |
| | | AAGGA | AAGGA |
| | Ex2 SA2 | GGATC | GGAUC |
| | (Pos 6) | CTGGA | CUGGA |
| | | GAGGA | GAGGA |
| | | AGGAG | AGGAG |
| | Ex4 STOP1 | GATGA | GAUGA |
| | (Pos 7) | CCAAC | CCAAC |
| | | TCTGG | UCUGG |
| | | GTAGG | GUAGG |
| | Ex5 SD1 | CCTTA | CCUUA |
| | (Pos 6) | CCCTC | CCCUC |
| | | AGGAT | AGGAU |
| | | TTCTC | UUCUC |
| | Ex7 STOP1 | GTGAT | GUGAU |
| | (Pos 9) | TCACC | UCACC |
| | | GGGAT | GGGAU |
| | | ATCAA | AUCAA |
| | Ex8 SA1 | CAACT | CAACU |
| | (Pos 4) | GTGGG | GUGGG |
| | | AGGAA | AGGAA |
| | | GAAAA | GAAAA |
| | Ex8 SD1 | GCCTC | GCCUC |
| | (Pos 9) | TTACT | UUACU |
| | | CTGTA | CUGUA |
| | | ATCAT | AUCAU |
| | Ex8 SD2 | TCTTA | UCUUA |
| | (Pos 6) | CTCTG | CUCUG |
| | | TAATC | UAAUC |
| | | ATAGG | AUAGG |
| | Ex10 SA1 | AGAGA | AGAGA |
| | (Pos 7) | GCTGG | GCUGG |
| | | GGAGA | GGAGA |
| | | GGAGA | GGAGA |
| | Ex12 STOP1 | CTGAA | CUGAA |
| | (Pos 6) | CAGGA | CAGGA |
| | | AGGAG | AGGAG |
| | | AGCCA | AGCCA |
| | Ex13 SA1 | ATGGA | AUGGA |
| | (Pos 7) | ACTGT | ACUGU |
| | | TGGAA | UGGAA |
| | | AAAGC | AAAGC |
| | Ex13 STOP2 | TTGAG | UUGAG |
| | (Pos 6) | CAGCA | CAGCA |
| | | GAAAG | GAAAG |
| | | AACAG | AACAG |
| | Ex14 STOP1 | GGAGA | GGAGA |
| | (Pos 9) | GAGCG | GAGCG |
| | | GGAAG | GGAAG |
| | | CTAGA | CUAGA |
| | Ex15 STOP1 | CCTTC | CCUUC |
| | (Pos 5) | AGCAG | AGCAG |
| | | CAGCT | CAGCU |
| | | GCTCC | GCUCC |
| | Ex16 SA1 | GGCAC | GGCAC |
| | (Pos 8) | TCCTT | UCCUU |
| | | GGAGA | GGAGA |
| | | GGGAG | GGGAG |
| | Ex16 STOP1 | CTCCC | CUCCC |
| | (Pos 7) | GCCAT | GCCAU |
| | | CGGCA | CGGCA |
| | | CTCCT | CUCCU |
| | Ex17 STOP1 | GAAGC | GAAGC |
| | (Pos 7) | CCAGT | CCAGU |
| | | CTAAG | CUAAG |
| | | CAGAC | CAGAC |
| | Ex17 SD1 | GTCGC | GUCGC |
| | (Pos 8) | TACCT | UACCU |
| | | GTGGC | GUGGC |
| | | TCCGC | UCCGC |
| | Ex18 STOP1 | TAGAC | UAGAC |
| | (Pos 5) | CAAGC | CAAGC |
| | | CTTTT | CUUUU |
| | | GGGT | GGGUA |
| | | A | |
| | Ex18 STOP1 | GGGCA | GGGCA |
| | (Pos 4) | GCAGA | GCAGA |
| | | ATAGC | AUAGC |
| | | CAGGC | CAGGC |
| | Ex19 STOP1 | AGGCT | AGGCU |
| | (Pos 9) | TCTGT | UCUGU |
| | | GGGAG | GGGAG |
| | | AGAGT | AGAGU |
| | Ex19 STOP2 | TGGGT | UGGGU |
| | (Pos 8) | CTCAG | CUCAG |
| | | AGTGG | AGUGG |
| | | CTCCG | CUCCG |
| | Ex20 SA1 | ATGAT | AUGAU |
| | (Pos 7) | GCTGT | GCUGU |
| | | TGGGT | UGGGU |
| | | TCAAA | UCAAA |
| | Ex20 SA2 | TGATG | UGAUG |
| | (Pos 6) | CTGTT | CUGUU |
| | | GGGTT | GGGUU |
| | | CAAAA | CAAAA |
| | Ex20 SD1 | ATCCT | AUCCU |
| | (Pos 8) | TACAG | UACAG |
| | | CAGGC | CAGGC |
| | | TTGAG | UUGAG |
| | Ex20 SD2 | AATCC | AAUCC |
| | (Pos 9) | TTACA | UUACA |
| | | GCAGG | GCAGG |
| | | CTTGA | CUUGA |
| | Ex24 STOP1 | TAGGC | UAGGC |
| | (Pos 8) | CACAG | CACAG |
| | | AGTGA | AGUGA |
| | | CACCC | CACCC |
| | Ex25 STOP | CCGAA | CCGAA |
| | (Pos 8) | GACGA | GACGA |
| | | TTTCA | UUUCA |
| | | ACAAA | ACAAA |
| | Ex26 STOP1 | AAGCA | AAGCA |
| | (Pos 4) | GGGAT | GGGAU |
| | | GGACA | GGACA |
| | | ACCGT | ACCGU |
| | Ex30 STOP1 | TCCCC | UCCCC |
| | (Pos 5) | AGCCC | AGCCC |
| | | ATTGT | AUUGU |
| | | CTGAT | CUGAU |
| | Ex30 STOP2 | GAGAT | GAGAU |
| | (Pos 7) | CCGAT | CCGAU |
| | | CTGTG | CUGUG |
| | | GAAAC | GAAAC |
| MAPK14 | Ex1 SD1 | CACTC | CACUC |
| | (Pos 7) | ACCAC | ACCAC |
| | | ACAGA | ACAGA |
| | | GCCAT | GCCAU |
| | Ex1 STOP1 | TTACC | UUACC |
| | (Pos 5) | AGAAC | AGAAC |
| | | CTGTC | CUGUC |
| | | TCCAG | UCCAG |
| | Ex2 SA1 | AGCAG | AGCAG |
| | (Pos 8) | CACTA | CACUA |
| | | AGGAG | AGGAG |
| | | AAAAA | AAAAA |
| | Ex2 SA2 | GCAGC | GCAGC |
| | (Pos 7) | ACTAA | ACUAA |
| | | GGAGA | GGAGA |
| | | AAAAA | AAAAA |
| | Ex5 SA1 | AGGTC | AGGUC |
| | (Pos 6) | CTAGG | CUAGG |
| | | AAGCA | AAGCA |
| | | AATAC | AAUAC |
| | Ex5 SA2 | GGTCC | GGUCC |
| | (Pos 5) | TAGGA | UAGGA |
| | | AGCAA | AGCAA |
| | | ATACA | AUACA |
| | Ex6 SA1 | CAGAA | CAGAA |
| | (Pos 7) | TCTAA | UCUAA |
| | | AGGGC | AGGGC |
| | | AGAAG | AGAAG |
| | Ex6 STOP1 | ATCCA | AUCCA |
| | (Pos 4) | GTTCA | GUUCA |
| | | GCATG | GCAUG |
| | | ATCTC | AUCUC |
| | Ex7 SD1 | AATAC | AAUAC |
| | (Pos 5) | CTCAG | CUCAG |
| | | TTGCC | UUGCC |
| | | GGTGC | GGUGC |
| | Ex7 STOP1 | CCCAC | CCCAC |
| | (Pos 9) | TGACC | UGACC |
| | | AAATA | AAAUA |
| | | TCAAC | UCAAC |
| | Ex8 SA1 | TATCT | UAUCU |
| | (Pos 4) | AATGG | AAUGG |
| | | TGGAC | UGGAC |
| | | CATAA | CAUAA |
| | Ex9 SA1 | ATATC | AUAUC |
| | (Pos 5) | TTAGA | UUAGA |
| | | TGCCT | UGCCU |
| | | AGTCA | AGUCA |
| | Ex9 STOP1 | CAGCA | CAGCA |
| | (Pos 4) | GATTA | GAUUA |
| | | TGCGT | UGCGU |
| | | CTGAC | CUGAC |
| | Ex10 SA1 | TTTCT | UUUCU |
| | (Pos 9) | TGCCT | UGCCU |
| | | GAAAA | GAAAA |
| | | AACAA | AACAA |
| | Ex11 SA1 | CAGCT | CAGCU |
| | (Pos 4) | ATCAG | AUCAG |
| | | TACCA | UACCA |
| | | TAGAC | UAGAC |
| | Ex11 STOP1 | ATGAT | AUGAU |
| | (Pos 6) | CAGTC | CAGUC |
| | | CTTTG | CUUUG |
| | | AAAGC | AAAGC |
| | Ex12 SA1 | GTCAG | GUCAG |
| | (Pos 8) | GCCTA | GCCUA |
| | | GAAAT | GAAAU |
| | | TGGGA | UGGGA |
| MEF2D | Ex2 SA1 | AAGTC | AAGUC |
| | (Pos 8) | ACCTG | ACCUG |
| | | CAGAG | CAGAG |
| | | AAGGA | AAGGA |
| | Ex2 SA2 | AGTCA | AGUCA |
| | (Pos 7) | CCTGC | CCUGC |
| | | AGAGA | AGAGA |
| | | AGGAT | AGGAU |
| | Ex2 SD1 | TGGGC | UGGGC |
| | (Pos 9) | CCACC | CCACC |
| | | TCGAT | UCGAU |
| | | GATGT | GAUGU |
| | Ex3 STOP1 | GGAAC | GGAAC |
| | (Pos 5) | AGAGC | AGAGC |
| | | CCCCT | CCCCU |
| | | GCTGG | GCUGG |
| | Ex3 STOP2 | CAAGT | CAAGU |
| | (Pos 8) | ACCGA | ACCGA |
| | | CGCGC | CGCGC |
| | | CAGCG | CAGCG |
| | Ex4 SA1 | AGCGC | AGCGC |
| | (Pos 6) | CTGGG | CUGGG |
| | | GGGAA | GGGAA |
| | | GGGGC | GGGGC |
| | Ex4 STOP1 | AATGA | AAUGA |
| | (Pos 8) | TGCAG | UGCAG |
| | | AGTTA | AGUUA |
| | | TAGAC | UAGAC |
| | Ex5 SA1 | CAGTT | CAGUU |
| | (Pos 8) | GACTA | GACUA |
| | | GACAG | GACAG |
| | | AAAGA | AAAGA |
| | Ex5 SA2 | TTGAC | UUGAC |
| | (Pos 5) | TAGAC | UAGAC |
| | | AGAAA | AGAAA |
| | | GATGG | GAUGG |
| | Ex5 SA3 | TGACT | UGACU |
| | (Pos 4) | AGACA | AGACA |
| | | GAAAG | GAAAG |
| | | ATGGA | AUGGA |
| | Ex5 STOP1 | CCCAG | CCCAG |
| | (Pos 6) | CAGCC | CAGCC |
| | | AGCAC | AGCAC |
| | | TACAG | UACAG |
| | Ex6 SD1 | TGCAC | UGCAC |
| | (Pos 9) | TCACC | UCACC |
| | | AACAG | AACAG |
| | | GGCTG | GGCUG |
| | Ex6 SD2 | CTCAC | CUCAC |
| | (Pos 5) | CAACA | CAACA |
| | | GGGCT | GGGCU |
| | | GGGGC | GGGGC |
| | Ex7 STOP1 | ACCTG | ACCUG |
| | (Pos 6) | CGAGT | CGAGU |
| | | CATCA | CAUCA |
| | | CTTCC | CUUCC |
| | Ex9 SD1 | CTCAC | CUCAC |
| | (Pos 5) | CTGTG | CUGUG |
| | | TTGTA | UUGUA |
| | | GGCAG | GGCAG |
| | Ex9 SD2 | TCACC | UCACC |
| | (Pos 4) | TGTGT | UGUGU |
| | | TGTAG | UGUAG |
| | | GCAGT | GCAGU |
| | Ex10 STOP1 | ACCTC | ACCUC |
| | (Pos 5) | AGCAA | AGCAA |
| | | CAGTC | CAGUC |
| | | CCACC | CCACC |
| | Ex11 SA1 | CCCGG | CCCGG |
| | (Pos 7) | GCTGG | GCUGG |
| | | AGGCA | AGGCA |
| | | GGCAA | GGCAA |
| | Ex12 SA1 | ATGTC | AUGUC |
| | (Pos 5) | TGTGA | UGUGA |
| | | AGAGA | AGAGA |
| | | GGAGA | GGAGA |
| MGAT5 | Ex2 STOP1 | TTTGC | UUUGC |
| | (Pos 5) | AGCGC | AGCGC |
| | | ATTGG | AUUGG |
| | | CAAGT | CAAGU |
| | Ex6 STOP1 | TCCGG | UCCGG |
| | (Pos 6) | CGAAT | CGAAU |
| | | GGCTG | GGCUG |
| | | ACGCA | ACGCA |
| | Ex7 SA1 | CGAGG | CGAGG |
| | (Pos 8) | ACCTG | ACCUG |
| | | GAAAA | GAAAA |
| | | CAAAG | CAAAG |
| | Ex8 SD1 | CACTT | CACUU |
| | (Pos 7) | ACTGG | ACUGG |
| | | TAATG | UAAUG |
| | | AACCC | AACCC |
| | Ex9 STOP1 | CTCCG | CUCCG |
| | (Pos 4) | AGTCC | AGUCC |
| | | TTGAT | UUGAU |
| | | TCATT | UCAUU |
| | Ex9 STOP2 | CAGAT | CAGAU |
| | (Pos 8) | TCCAT | UCCAU |
| | | TTTCC | UUUCC |
| | | CCAAG | CCAAG |
| | Ex9 STOP3 | TCAGA | UCAGA |
| | (Pos 9) | TTCCA | UUCCA |
| | | TTTTC | UUUUC |
| | | CCCAA | CCCAA |
| | Ex10 STOP1 | GAAGG | GAAGG |
| | (Pos 7) | CCATG | CCAUG |
| | | CCTGG | CCUGG |
| | | AACAC | AACAC |
| | Ex11 SD1 | TTACC | UUACC |
| | (Pos 4) | TTGGT | UUGGU |
| | | TTCTC | UUCUC |
| | | GAAGA | GAAGA |
| | Ex12 SD1 | ATGCT | AUGCU |
| | (Pos 8) | TACCT | UACCU |
| | | CTCTC | CUCUC |
| | | AGAGT | AGAGU |
| | Ex13 STOP1 | CAACA | CAACA |
| | (Pos 8) | ATCAG | AUCAG |
| | | GAGGA | GAGGA |
| | | AGTAG | AGUAG |
| | Ex15 STOP1 | GTGGC | GUGGC |
| | (Pos 5) | CACAT | CACAU |
| | | CACTT | CACUU |
| | | GCCCA | GCCCA |
| | Ex15 STOP2 | GCCCG | GCCCG |
| | (Pos 8) | GGCAG | GGCAG |
| | | TCCTG | UCCUG |
| | | CAAGC | CAAGC |
| | Ex16 SA1 | GTACC | GUACC |
| | (Pos 5) | TGAAG | UGAAG |
| | | AGGAA | AGGAA |
| | | GAGAA | GAGAA |
| | Ex16 STOP2 | CCCTG | CCCUG |
| | (Pos 6) | CCGGG | CCGGG |
| | | ACTTC | ACUUC |
| | | ATCAA | AUCAA |
| NT5E | Ex1 SD1 | TTACC | UUACC |
| (CD73) | (Pos 4) | ATGGC | AUGGC |
| | | ATCGT | AUCGU |
| | | AGCGC | AGCGC |
| | Ex1 STOP | AGGCC | AGGCC |
| | (Pos 4) | ACAGC | ACAGC |
| | | ACCGC | ACCGC |
| | | GCCCA | GCCCA |
| | Ex3 STOP1 | CGCTC | CGCUC |
| | (Pos 5) | AGAAA | AGAAA |
| | | GTGAG | GUGAG |
| | | GGGTG | GGGUG |
| | Ex4 STOP1 | GTAGT | GUAGU |
| | (Pos 7) | CCAGG | CCAGG |
| | | CCTAT | CCUAU |
| | | GCTTT | GCUUU |
| | Ex5 SA1 | GATCT | GAUCU |
| | (Pos 4) | AGAAG | AGAAG |
| | | AAAGA | AAAGA |
| | | AAAGA | AAAGA |
| | Ex5 SD1 | TTACC | UUACC |
| | (Pos 5) | ATTGC | AUUGC |
| | | ATCAC | AUCAC |
| | | AAATC | AAAUC |
| | Ex7 SD1 | GTGAC | GUGAC |
| | (Pos 9) | TTACC | UUACC |
| | | GCCCA | GCCCA |
| | | CCTGC | CCUGC |
| | Ex7 STOP1 | CTCCC | CUCCC |
| | (Pos 4) | AGGTA | AGGUA |
| | | ATTGT | AUUGU |
| | | GCCTG | GCCUG |
| | Ex8 STOP1 | AGGTG | AGGUG |
| | (Pos 8) | ACCAA | ACCAA |
| | | GATAT | GAUAU |
| | | CAACG | CAACG |
| | Ex8 STOP2 | GGTCG | GGUCG |
| | (Pos 4) | GATCA | GAUCA |
| | | AGTTT | AGUUU |
| | | TCCAC | UCCAC |
| ODC1 | Ex2 SA1 | TTATC | UUAUC |
| | (Pos 9) | ATCCT | AUCCU |
| | | GAAAC | GAAAC |
| | | AAGAG | AAGAG |
| | Ex3 SA1 | TTCAG | UUCAG |
| | (Pos 7) | TCTGA | UCUGA |
| | | AAAAG | AAAAG |
| | | AAGAG | AAGAG |
| | Ex7 STOP1 | AAGGA | AAGGA |
| | (Pos 7) | ACAGA | ACAGA |
| | | CGGGC | CGGGC |
| | | TCTGA | UCUGA |
| | Ex8 SD1 | GAAAT | GAAAU |
| | (Pos 8) | TACCT | UACCU |
| | | TTTGC | UUUGC |
| | | AGAAG | AGAAG |
| | Ex8 SD2 | AGAAA | AGAAA |
| | (Pos 9) | TTACC | UUACC |
| | | TTTTG | UUUUG |
| | | CAGAA | CAGAA |
| | Ex10 SA1 | GTTGC | GUUGC |
| | (Pos 6) | CTGAG | CUGAG |
| | | AAAGA | AAAGA |
| | | AAAAG | AAAAG |
| | Ex10 STOP1 | CTCTC | CUCUC |
| | (Pos 6) | CCAGG | CCAGG |
| | | CACAA | CACAA |
| | | GACAC | GACAC |
| OTULINL | Exon 1 ATG | CCGCC | CCGCC |
| (FAM105A) | | ATGCC | AUGCC |
| | | GGCCG | GGCCG |
| | | CGCTG | CGCUG |
| | Exon 2 STOP | GAAGT | GAAGU |
| | | GACCA | GACCA |
| | | AGTTC | AGUUC |
| | | ACTCC | ACUCC |
| | Exon 3 SA 2 | CAATC | CAAUC |
| | | CACCT | CACCU |
| | | GAAAG | GAAAG |
| | | ATAAA | AUAAA |
| | Exon 3 SA 1 | AATCC | AAUCC |
| | | ACCTG | ACCUG |
| | | AAAGA | AAAGA |
| | | TAAAA | UAAAA |
| | Exon 4 STOP | GTTAT | GUUAU |
| | | TTCAG | UUCAG |
| | | ATATT | AUAUU |
| | | CAGCC | CAGCC |
| | Exon 5 STOP 1 | TGTTT | UGUUU |
| | | TCACA | UCACA |
| | | AGGTT | AGGUU |
| | | GTAAT | GUAAU |
| | Exon 5 STOP 2 | TGGAT | UGGAU |
| | | TCAGC | UCAGC |
| | | AGTAC | AGUAC |
| | | AGTTT | AGUUU |
| | Exon 5 STOP 3 | AAAAC | AAAAC |
| | | ACAGG | ACAGG |
| | | TAAGT | UAAGU |
| | | GTTTG | GUUUG |
| | Exon 5 STOP 4 | AAACA | AAACA |
| | | CAGGT | CAGGU |
| | | AAGTG | AAGUG |
| | | TTTGC | UUUGC |
| | Exon 5 STOP 5 | AACAC | AACAC |
| | | AGGTA | AGGUA |
| | | AGTGT | AGUGU |
| | | TTGCG | UUGCG |
| | Exon 6 STOP 1 | TGAAC | UGAAC |
| | | AAATG | AAAUG |
| | | AAGAC | AAGAC |
| | | TAAAA | UAAAA |
| | Exon 6 STOP 2 | ACTAG | ACUAG |
| | | AGCAG | AGCAG |
| | | GTAAC | GUAAC |
| | | CGGGG | CGGGG |
| | Exon 7 STOP | ATCTC | AUCUC |
| | | CGGCC | CGGCC |
| | | AGTCC | AGUCC |
| | | CTGAG | CUGAG |
| PAG1 | E1 STOP1 | GACAG | GACAG |
| | (Pops 9) | ATGCA | AUGCA |
| | | GATCA | GAUCA |
| | | CCCTG | CCCUG |
| | Ex4 STOP1 | AGGAA | AGGAA |
| | (pos 9) | GTCCA | GUCCA |
| | | GACAT | GACAU |
| | | CGGCC | CGGCC |
| | Ex4 STOP2 | TGGAT | UGGAU |
| | (Pos 9) | TCCCA | UCCCA |
| | | GGACA | GGACA |
| | | GCACA | GCACA |
| | Ex4 SD1 | GCCCA | GCCCA |
| | (Pos 6) | CCTTG | CCUUG |
| | | TTAGT | UUAGU |
| | | TTCAC | UUCAC |
| | Ex4 STOP4 | AAACC | AAACC |
| | (Pos 8) | TTCAG | UUCAG |
| | | GAGAA | GAGAA |
| | | GGAAG | GGAAG |
| | Ex6 SA1 | GCTGA | GCUGA |
| | (Pos 9) | GATCT | GAUCU |
| | | AGGAG | AGGAG |
| | | ACAAA | ACAAA |
| | Ex6 STOP1 | GATAC | GAUAC |
| | (Pos 6) | AGACT | AGACU |
| | | CTCAA | CUCAA |
| | | CAGAG | CAGAG |
| | Ex6 STOP2 | CCATT | CCAUU |
| | (Pos 6) | CAAGG | CAAGG |
| | | GGACC | GGACC |
| | | CACAG | CACAG |
| | Ex6 STOP3 | GGGGC | GGGGC |
| | (Pos 5) | AGTCG | AGUCG |
| | | CTTAC | CUUAC |
| | | AGTTC | AGUUC |
| PDIA3 | Ex1 SD1 | ACTTA | ACUUA |
| | (Pos 6) | CCCTC | CCCUC |
| | | TGACT | UGACU |
| | | TCATA | UCAUA |
| | Ex6 STOP1 | ACAGA | ACAGA |
| | (Pos 7) | GCAAA | GCAAA |
| | | AAATG | AAAUG |
| | | ACCAG | ACCAG |
| | Ex7 SD1 | TTACC | UUACC |
| | (Pos 7) | TGTTT | UGUUU |
| | | CTCCA | CUCCA |
| | | GTAGT | GUAGU |
| | Ex9 SA1 | ACGCC | ACGCC |
| | (Pos 5) | TACAA | UACAA |
| | | TTGGA | UUGGA |
| | | AAACA | AAACA |
| | Ex9 SA2 | CGCCT | CGCCU |
| | (Pos 4) | ACAAT | ACAAU |
| | | TGGAA | UGGAA |
| | | AACAA | AACAA |
| | Ex9 STOP1 | TTCCT | UUCCU |
| | (Pos 7) | GCAGG | GCAGG |
| | | ATTAC | AUUAC |
| | | TTTGA | UUUGA |
| | Ex11 SA1 | TGCTG | UGCUG |
| | (Pos 8) | AGCTG | AGCUG |
| | | TTAAT | UUAAU |
| | | AAAAC | AAAAC |
| | Ex12 SD1 | TCACT | UCACU |
| | (Pos 8) | TACTT | UACUU |
| | | CATAT | CAUAU |
| | | TTCTT | UUCUU |
| PHD1 | Ex1 STOP1 | CCAGC | CCAGC |
| (EGLN2) | (Pos 8) | CGCAG | CGCAG |
| | | CCCCT | CCCCU |
| | | AAGTC | AAGUC |
| | Ex1 STOP2 | TGGCC | UGGCC |
| | (Pos 5) | GGGCC | GGGCC |
| | | AGGAT | AGGAU |
| | | GGGAG | GGGAG |
| | Ex1 STOP3 | ACGGG | ACGGG |
| | (Pos 6) | CAGCT | CAGCU |
| | | AGTGA | AGUGA |
| | | GCCAG | GCCAG |
| | Ex1 STOP4 | CGGGC | CGGGC |
| | (Pos 5) | AGCTA | AGCUA |
| | | GTGAG | GUGAG |
| | | CCAGA | CCAGA |
| | Ex2 SA1 | GGCCT | GGCCU |
| | (Pos 4) | GGCAG | GGCAG |
| | | GGATG | GGAUG |
| | | GAGGG | GAGGG |
| | Ex2 SA2 | CATGG | CAUGG |
| | (Pos 7) | CCTGG | CCUGG |
| | | CAGGG | CAGGG |
| | | ATGGA | AUGGA |
| | Ex2 SA3 | CCATG | CCAUG |
| | (Pos 8) | GCCTG | GCCUG |
| | | GCAGG | GCAGG |
| | | GATGG | GAUGG |
| | Ex2 STOP1 | TAACG | UAACG |
| | (Pos 8) | TCCCA | UCCCA |
| | | GTTCT | GUUCU |
| | | GATTC | GAUUC |
| | Ex2 STOP2 | GAATC | GAAUC |
| | (Pos 5) | AGAAC | AGAAC |
| | | TGGGA | UGGGA |
| | | CGTTA | CGUUA |
| | Ex3 SA1 | TGCAC | UGCAC |
| | (Pos 6) | CTGGG | CUGGG |
| | | GGCAG | GGCAG |
| | | GCCAA | GCCAA |
| | Ex3 SD1 | TCATA | UCAUA |
| | (Pos 6) | CCTGG | CCUGG |
| | | TGGCA | UGGCA |
| | | TAGGC | UAGGC |
| | Ex3 STOP1 | CCTGC | CCUGC |
| | (Pos 8) | TGCAG | UGCAG |
| | | ATCTT | AUCUU |
| | | CCCTG | CCCUG |
| | Ex4 SA1 | TACCT | UACCU |
| | (Pos 4) | GGAGA | GGAGA |
| | | CCAGG | CCAGG |
| | | GTGGT | GUGGU |
| | Ex4 SA2 | GGCGT | GGCGU |
| | (Pos 8) | ACCTG | ACCUG |
| | | GAGAC | GAGAC |
| | | CAGGG | CAGGG |
| | Ex5 SA1 | CCTGA | CCUGA |
| | (Pos 8) | TGCTG | UGCUG |
| | | GGGGT | GGGGU |
| | | GAGAG | GAGAG |
| | Ex5 SA2 | TCCTG | UCCUG |
| | (Pos 9) | ATGCT | AUGCU |
| | | GGGGG | GGGGG |
| | | TGAGA | UGAGA |
| PHD2 | Ex1 STOP1 | CGGCA | CGGCA |
| (EGLN1) | (Pos 4) | GTACT | GUACU |
| | | GCGAG | GCGAG |
| | | CTGTG | CUGUG |
| | Ex1 STOP1 | CGGAC | CGGAC |
| | (Pos 5) | AGCAG | AGCAG |
| | | ATCGG | AUCGG |
| | | CGACG | CGACG |
| | Ex1 STOP2 | GCTTC | GCUUC |
| | (Pos 8) | TTCCA | UUCCA |
| | | GTCCT | GUCCU |
| | | GACGC | GACGC |
| | Ex3 SD1 | TACTA | UACUA |
| | (Pos 6) | CCTTG | CCUUG |
| | | TAGCA | UAGCA |
| | | TATGC | UAUGC |
| | Ex3 STOP1 | ATACT | AUACU |
| | (Pos 7) | TCGAA | UCGAA |
| | | TTTTT | UUUUU |
| | | CCAGA | CCAGA |
| PHD3 | Ex1 STOP1 | GTCAA | GUCAA |
| (EGLN3) | (Pos 7) | GCAGC | GCAGC |
| | | TGCAC | UGCAC |
| | | TGCAC | UGCAC |
| | Ex1 STOP2 | TCAAG | UCAAG |
| | (Pos 6) | CAGCT | CAGCU |
| | | GCACT | GCACU |
| | | GCACC | GCACC |
| | Ex1 STOP3 | CAAGC | CAAGC |
| | (Pos 5) | AGCTG | AGCUG |
| | | CACTG | CACUG |
| | | CACCG | CACCG |
| | Ex3 SA1 | GTAGC | GUAGC |
| | (Pos 5) | TGAAA | UGAAA |
| | | GACAC | GACAC |
| | | AAAGA | AAAGA |
| | Ex3 SA2 | TAGCT | UAGCU |
| | (Pos 4) | GAAAG | GAAAG |
| | | ACACA | ACACA |
| | | AAGAA | AAGAA |
| | Ex3 SD1 | CTATT | CUAUU |
| | (Pos 7) | ACCTG | ACCUG |
| | | GTTGC | GUUGC |
| | | GTAAG | GUAAG |
| | Ex3 SD2 | TATTA | UAUUA |
| | (Pos 6) | CCTGG | CCUGG |
| | | TTGCG | UUGCG |
| | | TAAGA | UAAGA |
| | Ex3 STOP1 | ATCCT | AUCCU |
| | (Pos 7) | GCGGA | GCGGA |
| | | TATTT | UAUUU |
| | | CCAGA | CCAGA |
| | Ex3 STOP2 | TCCTG | UCCUG |
| | (Pos 6) | CGGAT | CGGAU |
| | | ATTTC | AUUUC |
| | | CAGAG | CAGAG |
| | Ex5 SA1 | TCCCT | UCCCU |
| | (Pos 4) | GGGTT | GGGUU |
| | | GGGGA | GGGGA |
| | | CAGAA | CAGAA |
| PIK3CD | Ex1 SD1 | ATACC | AUACC |
| | (Pos 4) | TGCTT | UGCUU |
| | | GATGG | GAUGG |
| | | TGCTG | UGCUG |
| | Ex1 STOP1 | CCTTG | CCUUG |
| | (Pos 8) | GTCCA | GUCCA |
| | | GAATT | GAAUU |
| | | CCATG | CCAUG |
| | Ex2 SA1 | GCAGC | GCAGC |
| | (Pos 5) | TGGAG | UGGAG |
| | | GGACA | GGACA |
| | | GTCAC | GUCAC |
| | Ex2 STOP1 | GCGGT | GCGGU |
| | (Pos 7) | GCCAC | GCCAC |
| | | AGCAG | AGCAG |
| | | CTGGA | CUGGA |
| | Ex2 STOP2 | CGCGG | CGCGG |
| | (Pos 8) | TGCCA | UGCCA |
| | | CAGCA | CAGCA |
| | | GCTGG | GCUGG |
| | Ex2 STOP3 | GGCCC | GGCCC |
| | (Pos 6) | CCAGG | CCAGG |
| | | TTTGA | UUUGA |
| | | GCCGA | GCCGA |
| | Ex2 STOP4 | AGGCC | AGGCC |
| | (Pos 7) | CCCAG | CCCAG |
| | | GTTTG | GUUUG |
| | | AGCCG | AGCCG |
| | Ex3 SA1 | CTCTC | CUCUC |
| | (Pos 6) | CTGTG | CUGUG |
| | | GGGAG | GGGAG |
| | | GAGGG | GAGGG |
| | Ex3 SA2 | AAGCT | AAGCU |
| | (Pos 9) | CTCCT | CUCCU |
| | | GTGGG | GUGGG |
| | | GAGGA | GAGGA |
| | Ex3 SD1 | CTCAC | CUCAC |
| | (Pos 5) | CTGGA | CUGGA |
| | | ACTGG | ACUGG |
| | | CAGAG | CAGAG |
| | Ex3 SD2 | TCACC | UCACC |
| | (Pos 4) | TGGAA | UGGAA |
| | | CTGGC | CUGGC |
| | | AGAGC | AGAGC |
| | Ex4 SA1 | GATGT | GAUGU |
| | (Pos 7) | ACTGA | ACUGA |
| | | GACGG | GACGG |
| | | GGTGC | GGUGC |
| | Ex4 SA2 | ATGTA | AUGUA |
| | (Pos 6) | CTGAG | CUGAG |
| | | ACGGG | ACGGG |
| | | GTGCA | GUGCA |
| | Ex4 SD1 | TCTCA | UCUCA |
| | (Pos 6) | CCTTC | CCUUC |
| | | TTCGC | UUCGC |
| | | AGGAA | AGGAA |
| | Ex4 SD2 | CTCAC | CUCAC |
| | (Pos 5) | CTTCT | CUUCU |
| | | TCGCA | UCGCA |
| | | GGAAT | GGAAU |
| | Ex5 SA1 | AGGCT | AGGCU |
| | (Pos 4) | GGGGG | GGGGG |
| | | CCGGG | CCGGG |
| | | GAAGC | GAAGC |
| | Ex5 SD1 | CCCCA | CCCCA |
| | (Pos 6) | CCTTC | CCUUC |
| | | ATCCG | AUCCG |
| | | CTCGT | CUCGU |
| | Ex6 SA1 | CACCA | CACCA |
| | (Pos 7) | GCTGT | GCUGU |
| | | AGAAG | AGAAG |
| | | GTGCC | GUGCC |
| | Ex6 SA2 | CCACC | CCACC |
| | (Pos 8) | AGCTG | AGCUG |
| | | TAGAA | UAGAA |
| | | GGTGC | GGUGC |
| | Ex6 STOP1 | GTGCA | GUGCA |
| | (Pos 4) | GGCCG | GGCCG |
| | | GGCTT | GGCUU |
| | | TTCCA | UUCCA |
| | Ex7 SA1 | GTCCT | GUCCU |
| | (Pos 4) | GCAGA | GCAGA |
| | | AGGAC | AGGAC |
| | | AGGGC | AGGGC |
| | Ex7 SA2 | GGCAG | GGCAG |
| | (Pos 8) | TCCTG | UCCUG |
| | | CAGAA | CAGAA |
| | | GGACA | GGACA |
| | Ex7 SA3 | GGGCA | GGGCA |
| | (Pos 9) | GTCCT | GUCCU |
| | | GCAGA | GCAGA |
| | | AGGAC | AGGAC |
| | Ex7 STOP1 | CAAGG | CAAGG |
| | (Pos 8) | ACCAG | ACCAG |
| | | CTTAA | CUUAA |
| | | GACCG | GACCG |
| | Ex7 STOP2 | ACAAG | ACAAG |
| | (Pos 9) | GACCA | GACCA |
| | | GCTTA | GCUUA |
| | | AGACC | AGACC |
| | Ex8 SD1 | CACTG | CACUG |
| | (Pos 7) | ACCTT | ACCUU |
| | | CTCCA | CUCCA |
| | | GGGCG | GGGCG |
| | Ex8 SD2 | CCACT | CCACU |
| | (Pos 8) | GACCT | GACCU |
| | | TCTCC | UCUCC |
| | | AGGGC | AGGGC |
| | Ex9 STOP1 | AGGCG | AGGCG |
| | (Pos 9) | CATCC | CAUCC |
| | | ACAGC | ACAGC |
| | | AGCTC | AGCUC |
| | Ex9 STOP2 | TTTGT | UUUGU |
| | (Pos 8) | TGCAG | UGCAG |
| | | ATCTT | AUCUU |
| | | GGAGC | GGAGC |
| | Ex9 STOP3 | TGTTG | UGUUG |
| | (Pos 6) | CAGAT | CAGAU |
| | | CTTGG | CUUGG |
| | | AGCTG | AGCUG |
| | Ex9 STOP3 | TTGTT | UUGUU |
| | (Pos 7) | GCAGA | GCAGA |
| | | TCTTG | UCUUG |
| | | GAGCT | GAGCU |
| | Ex10 SA1 | AGCTG | AGCUG |
| | (Pos 6) | CTGAG | CUGAG |
| | | GGGTG | GGGUG |
| | | TGGGC | UGGGC |
| | Ex10 SA2 | CTGCA | CUGCA |
| | (Pos 7) | GCTGC | GCUGC |
| | | TGAGG | UGAGG |
| | | GGTGT | GGUGU |
| | Ex10 SA3 | GCTGC | GCUGC |
| | (Pos 8) | AGCTG | AGCUG |
| | | CTGAG | CUGAG |
| | | GGGTG | GGGUG |
| | Ex10 STOP1 | TGTGG | UGUGG |
| | (Pos 8) | CCCAG | CCCAG |
| | | GTGGG | GUGGG |
| | | TGGGG | UGGGG |
| | Ex11 SA1 | AGAGC | AGAGC |
| | (Pos 8) | ATCTG | AUCUG |
| | | GGGGG | GGGGG |
| | | AGCCG | AGCCG |
| | Ex12 SA1 | ATCGT | AUCGU |
| | (Pos 8) | CCCTG | CCCUG |
| | | CAGGG | CAGGG |
| | | AAGGA | AAGGA |
| | Ex12 SD1 | GCTAC | GCUAC |
| | (Pos 5) | CGGAG | CGGAG |
| | | GTGCC | GUGCC |
| | | AGAAA | AGAAA |
| | Ex13 SA1 | GGAGC | GGAGC |
| | (Pos 5) | TGGAA | UGGAA |
| | | GGTGA | GGUGA |
| | | AGGGA | AGGGA |
| | Ex13 SA2 | CGGAG | CGGAG |
| | (Pos 6) | CTGGA | CUGGA |
| | | AGGTG | AGGUG |
| | | AAGGG | AAGGG |
| | Ex13 SA3 | TCTCG | UCUCG |
| | (Pos 9) | GAGCT | GAGCU |
| | | GGAAG | GGAAG |
| | | GTGAA | GUGAA |
| | Ex13 STOP1 | GATGA | GAUGA |
| | (Pos 8) | AGCAG | AGCAG |
| | | GTGAG | GUGAG |
| | | GCCCA | GCCCA |
| | Ex14 SA1 | CCCCT | CCCCU |
| | (Pos 4) | GGTGG | GGUGG |
| | | GCAGA | GCAGA |
| | | TGGGA | UGGGA |
| | Ex14 SA2 | CCCCC | CCCCC |
| | (Pos 5) | TGGTG | UGGUG |
| | | GGCAG | GGCAG |
| | | ATGGG | AUGGG |
| | Ex14 SA3 | CTTCC | CUUCC |
| | (Pos 8) | CCCTG | CCCUG |
| | | GTGGG | GUGGG |
| | | CAGAT | CAGAU |
| | Ex14 SA4 | GCTTC | GCUUC |
| | (Pos 9) | CCCCT | CCCCU |
| | | GGTGG | GGUGG |
| | | GCAGA | GCAGA |
| | Ex14 SD1 | CTCAC | CUCAC |
| | (Pos 5) | CAGAC | CAGAC |
| | | TTCAG | UUCAG |
| | | CCAGC | CCAGC |
| | Ex14 SD2 | TCACC | UCACC |
| | (Pos 4) | AGACT | AGACU |
| | | TCAGC | UCAGC |
| | | CAGCA | CAGCA |
| | Ex15 SA1 | ACGCT | ACGCU |
| | (Pos 4) | GCCAG | GCCAG |
| | | GCCAG | GCCAG |
| | | AGAGC | AGAGC |
| | Ex15 SA2 | CACGC | CACGC |
| | (Pos 5) | TGCCA | UGCCA |
| | | GGCCA | GGCCA |
| | | GAGAG | GAGAG |
| | Ex15 STOP1 | GATCC | GAUCC |
| | (Pos 4) | ACAGG | ACAGG |
| | | GGCTT | GGCUU |
| | | CATCT | CAUCU |
| | Ex16 SA1 | GGTCT | GGUCU |
| | (Pos 4) | GTGCC | GUGCC |
| | | ACCGG | ACCGG |
| | | CCGGT | CCGGU |
| | Ex16 SA2 | AGGTC | AGGUC |
| | (Pos 5) | TGTGC | UGUGC |
| | | CACCG | CACCG |
| | | GCCGG | GCCGG |
| | Ex16 SA3 | CGGAG | CGGAG |
| | (Pos 8) | GTCTG | GUCUG |
| | | TGCCA | UGCCA |
| | | CCGGC | CCGGC |
| | Ex16 STOP1 | CCTGC | CCUGC |
| | (Pos 5) | AGATG | AGAUG |
| | | ATCCA | AUCCA |
| | | GCTCA | GCUCA |
| | Ex17 SA1 | ATCCT | AUCCU |
| | (Pos 4) | AGGCA | AGGCA |
| | | AGGGG | AGGGG |
| | | GAAGA | GAAGA |
| | Ex17 SA2 | CATCC | CAUCC |
| | (Pos 5) | TAGGC | UAGGC |
| | | AAGGG | AAGGG |
| | | GGAAG | GGAAG |
| | Ex18 SD1 | CCTGT | CCUGU |
| | (Pos 7) | ACCTG | ACCUG |
| | | CCCAC | CCCAC |
| | | TCTCT | UCUCU |
| | Ex18 ST0P1 | GAGTG | GAGUG |
| | (Pos 8) | GGCAG | GGCAG |
| | | GTACA | GUACA |
| | | GGGGC | GGGGC |
| | Ex19 SA1 | AACAG | AACAG |
| | (Pos 6) | CTGAG | CUGAG |
| | | GGGAG | GGGAG |
| | | GGGAG | GGGAG |
| | Ex20 SA1 | AACCT | AACCU |
| | (Pos 4) | GCAGG | GCAGG |
| | | TAGGG | UAGGG |
| | | GACAG | GACAG |
| | Ex21 SA1 | GTCCT | GUCCU |
| | (Pos 4) | GCAAA | GCAAA |
| | | CAAAT | CAAAU |
| | | CACAG | CACAG |
| | Ex21 STOP1 | GGTTT | GGUUU |
| | (Pos 7) | TCCAG | UCCAG |
| | | CTCTC | CUCUC |
| | | ACGGA | ACGGA |
| | Ex21 STOP2 | TGGTT | UGGUU |
| | (Pos 8) | TTCCA | UUCCA |
| | | GCTCT | GCUCU |
| | | CACGG | CACGG |
| PIKFYVE | Ex2 STOP1 | GGAGA | GGAGA |
| | (Pos 7) | ACAGC | ACAGC |
| | | AGCCT | AGCCU |
| | | TTGAG | UUGAG |
| | Ex2 STOP2 | CTGGT | CUGGU |
| | (Pos 6) | CCAAC | CCAAC |
| | | TTCCA | UUCCA |
| | | CTCAA | CUCAA |
| | Ex5 STOP1 | CTGGC | CUGGC |
| | (Pos 8) | ATCCA | AUCCA |
| | | GTATT | GUAUU |
| | | GTTTC | GUUUC |
| | Ex7 SA1 | AATCA | AAUCA |
| | (Pos 8) | AACTA | AACUA |
| | | TAAAG | UAAAG |
| | | AAAAT | AAAAU |
| | Ex7 SD1 | TCAGT | UCAGU |
| | (Pos 9) | TTACC | UUACC |
| | | TATTT | UAUUU |
| | | CGAGC | CGAGC |
| | Ex9 STOP1 | GTGTG | GUGUG |
| | (Pos 6) | CAGTT | CAGUU |
| | | AAAAG | AAAAG |
| | | ACCTG | ACCUG |
| | Ex10 STOP1 | AGGGC | AGGGC |
| | (Pos 7) | ACAAG | ACAAG |
| | | CTATA | CUAUA |
| | | GCAAT | GCAAU |
| | Ex11 SA1 | TACTC | UACUC |
| | (Pos 5) | TGAAA | UGAAA |
| | | GGATG | GGAUG |
| | | AAGAC | AAGAC |
| | Ex11 STOP1 | ACAGA | ACAGA |
| | (Pos 7) | ACAGA | ACAGA |
| | | TAGCT | UAGCU |
| | | GAAGA | GAAGA |
| | Ex12 SA1 | AATCT | AAUCU |
| | (Pos 4) | TTTAG | UUUAG |
| | | TGTTG | UGUUG |
| | | GGAAG | GGAAG |
| | Ex12 SA2 | GAATC | GAAUC |
| | (Pos 5) | TTTTA | UUUUA |
| | | GTGTT | GUGUU |
| | | GGGAA | GGGAA |
| | Ex12 SA3 | AGAAT | AGAAU |
| | (Pos 6) | CTTTT | CUUUU |
| | | AGTGT | AGUGU |
| | | TGGGA | UGGGA |
| | Ex12 SD1 | CTCCT | CUCCU |
| | (Pos 7) | ACCTT | ACCUU |
| | | TTTGG | UUUGG |
| | | TCAGC | UCAGC |
| | Ex12 SD2 | TCCTA | UCCUA |
| | (Pos 6) | CCTTT | CCUUU |
| | | TTGGT | UUGGU |
| | | CAGCA | CAGCA |
| | Ex14 SD1 | GCCTT | GCCUU |
| | (Pos 7) | ACAGC | ACAGC |
| | | AACCT | AACCU |
| | | CTCCA | CUCCA |
| | Ex17 SD1 | ATTCT | AUUCU |
| | (Pos 8) | TACCT | UACCU |
| | | GAAGC | GAAGC |
| | | ACAAT | ACAAU |
| PPARa | Ex2 SA1 | AAGCG | AAGCG |
| | (Pos 9) | TGTCT | UGUCU |
| | | GGGGA | GGGGA |
| | | AAAAG | AAAAG |
| | Ex4 SA1 | GAATC | GAAUC |
| | (Pos 7) | GCTAG | GCUAG |
| | | GGTTT | GGUUU |
| | | GGAGG | GGAGG |
| | Ex4 SA2 | CGAAT | CGAAU |
| | (Pos 8) | CGCTA | CGCUA |
| | | GGGTT | GGGUU |
| | | TGGAG | UGGAG |
| | Ex4 SA3 | ACGAA | ACGAA |
| | (Pos 9) | TCGCT | UCGCU |
| | | AGGGT | AGGGU |
| | | TTGGA | UUGGA |
| | Ex4 SD1 | AACAC | AACAC |
| | (Pos 9) | CTACT | CUACU |
| | | GGATT | GGAUU |
| | | GTTAC | GUUAC |
| | Ex5 STOP1 | TGGCA | UGGCA |
| | (Pos 8) | TCCAG | UCCAG |
| | | AACAA | AACAA |
| | | GGAGG | GGAGG |
| | Ex5 STOP2 | CATCC | CAUCC |
| | (Pos 5) | AGAAC | AGAAC |
| | | AAGGA | AAGGA |
| | | GGCGG | GGCGG |
| | Ex6 STOP1 | CGCTA | CGCUA |
| | (Pos 9) | CTGCA | CUGCA |
| | | GGAGA | GGAGA |
| | | TCTAC | UCUAC |
| | Ex6 STOP2 | GGTGC | GGUGC |
| | (Pos 5) | AGATC | AGAUC |
| | | ATCAA | AUCAA |
| | | GAAGA | GAAGA |
| | Ex6 STOP3 | CCACC | CCACC |
| | (Pos 8) | TGCAG | UGCAG |
| | | AGCAA | AGCAA |
| | | CCACC | CCACC |
| PPARd | Ex1 SD1 | TCACC | UCACC |
| | (Pos 4) | TGTGT | UGUGU |
| | | AGCTG | AGCUG |
| | | CTGGA | CUGGA |
| | Ex1 SD2 | CTCCT | CUCCU |
| | (Pos 8) | CACCT | CACCU |
| | | GTGTA | GUGUA |
| | | GCTGC | GCUGC |
| | Ex1 STOP | GCCAC | GCCAC |
| | (Pos 5) | AGGAG | AGGAG |
| | | GAAGC | GAAGC |
| | | CCCTG | CCCUG |
| | Ex2 SA1 | AGAGG | AGAGG |
| | (Pos 7) | TCTGC | UCUGC |
| | | GGACA | GGACA |
| | | CACGA | CACGA |
| | Ex2 STOP1 | CAACT | CAACU |
| | (Pos 7) | GCAGA | GCAGA |
| | | TGGGC | UGGGC |
| | | TGTGA | UGUGA |
| | Ex2 STOP2 | AACTG | AACUG |
| | (Pos 6) | CAGAT | CAGAU |
| | | GGGCT | GGGCU |
| | | GTGAC | GUGAC |
| | Ex3 SA1 | AGCCC | AGCCC |
| | (Pos 5) | TGAAG | UGAAG |
| | | CACCA | CACCA |
| | | AGAAC | AGAAC |
| | Ex3 STOP1 | CTTCC | CUUCC |
| | (pos 5) | AGAAG | AGAAG |
| | | TGCCT | UGCCU |
| | | GGCAC | GGCAC |
| | Ex4 SA1 | GGATA | GGAUA |
| | (Pos 7) | GCTGC | GCUGC |
| | | ACAGG | ACAGG |
| | | GAAGG | GAAGG |
| | Ex4 SA2 | CGGAT | CGGAU |
| | (Pos 8) | AGCTG | AGCUG |
| | | CACAG | CACAG |
| | | GGAAG | GGAAG |
| | Ex4 SA3 | ACGGA | ACGGA |
| | (Pos 9) | TAGCT | UAGCU |
| | | GCACA | GCACA |
| | | GGGAA | GGGAA |
| | Ex4 SD1 | AACAC | AACAC |
| | (Pos 9) | TCACC | UCACC |
| | | GCCGT | GCCGU |
| | | GTGGC | GUGGC |
| | Ex5 SD1 | CTCAC | CUCAC |
| | (Pos 5) | CTCCA | CUCCA |
| | | CACAG | CACAG |
| | | AATGA | AAUGA |
| | Ex5 STOP1 | GTGGC | GUGGC |
| | (Pos 5) | AGGCA | AGGCA |
| | | GAGAA | GAGAA |
| | | GGGGC | GGGGC |
| | Ex6 SA1 | GGCCG | GGCCG |
| | (Pos 8) | GTCTG | GUCUG |
| | | TGGGG | UGGGG |
| | | ACACA | ACACA |
| | Ex6 SA2 | TGGCC | UGGCC |
| | (Pos 9) | GGTCT | GGUCU |
| | | GTGGG | GUGGG |
| | | GACAC | GACAC |
| | Ex6 SA3 | CAGCT | CAGCU |
| | (Pos 4) | TGGGG | UGGGG |
| | | AAGAG | AAGAG |
| | | GTACT | GUACU |
| | Ex6 SA4 | GCAGC | GCAGC |
| | (Pos 5) | TTGGG | UUGGG |
| | | GAAGA | GAAGA |
| | | GGTAC | GGUAC |
| | Ex6 STOP1 | TCTGC | UCUGC |
| | (Pos 8) | TCCAG | UCCAG |
| | | GAGAT | GAGAU |
| | | CTACA | CUACA |
| PRDMI1 | Iso 1 ATG | GGTCA | GGUCA |
| | | TGGCC | UGGCC |
| | | GCCAG | GCCAG |
| | | ACCCT | ACCCU |
| | Exon 2 STOP | GTCCA | GUCCA |
| | | GTGTC | GUGUC |
| | | CCAGA | CCAGA |
| | | ATGCC | AUGCC |
| | Exon 2 SD | AATCA | AAUCA |
| | | CCTCT | CCUCU |
| | | GAACA | GAACA |
| | | ATCCC | AUCCC |
| | Exon 3 SA | CAGCC | CAGCC |
| | | TGGAA | UGGAA |
| | | GAGAA | GAGAA |
| | | AGGAA | AGGAA |
| | Exon 3 SD 1 | GCTTA | GCUUA |
| | | CCTCT | CCUCU |
| | | TCACT | UCACU |
| | | GTTGG | GUUGG |
| | Exon 3 SD 2 | GAGGC | GAGGC |
| | | TTACC | UUACC |
| | | TCTTC | UCUUC |
| | | ACTGT | ACUGU |
| | Exon 6 SA 3 | TTGTG | UUGUG |
| | | CTGAA | CUGAA |
| | | ATAAA | AUAAA |
| | | GAAAA | GAAAA |
| | Exon 6 SA 2 | TGTGC | UGUGC |
| | | TGAAA | UGAAA |
| | | TAAAG | UAAAG |
| | | AAAAA | AAAAA |
| | Exon 6 SA 1 | GTGCT | GUGCU |
| | | GAAAT | GAAAU |
| | | AAAGA | AAAGA |
| | | AAAAG | AAAAG |
| | Exon 6 SD | CTACC | CUACC |
| | | TTCAG | UUCAG |
| | | ATTGG | AUUGG |
| | | AGAGC | AGAGC |
| | Exon 7 SD | CTGCG | CUGCG |
| | | CACCT | CACCU |
| | | GGCAT | GGCAU |
| | | TCATG | UCAUG |
| | Exon 8 STOP | TTGCA | UUGCA |
| | | AAGAA | AAGAA |
| | | ACATG | ACAUG |
| | | GGGAA | GGGAA |
| PRKACA | Ex1 Isoform SD1 | TGACC | UGACC |
| | (Pos 4) | GACAT | GACAU |
| | | TCCAT | UCCAU |
| | | GGCCA | GGCCA |
| | Ex2 SA1 | TTTCA | UUUCA |
| | (Pos 6) | CTGAA | CUGAA |
| | | AGGGA | AGGGA |
| | | GAGAG | GAGAG |
| | Ex2 SA2 | CTTTC | CUUUC |
| | (Pos 7) | ACTGA | ACUGA |
| | | AAGGG | AAGGG |
| | | AGAGA | AGAGA |
| | Ex2 SA3 | TCTTT | UCUUU |
| | (Pos 8) | CACTG | CACUG |
| | | AAAGG | AAAGG |
| | | GAGAG | GAGAG |
| | Ex3 SA1 | TGTTC | UGUUC |
| | (Pos5) | TGTGG | UGUGG |
| | | GCAGA | GCAGA |
| | | GGGGT | GGGGU |
| | Ex3 SA2 | GCTGT | GCUGU |
| | (Pos 9) | GTTCT | GUUCU |
| | | GTGGG | GUGGG |
| | | CAGAG | CAGAG |
| | Ex3 SD1 | ACCTC | ACCUC |
| | (Pos 7) | ACCTT | ACCUU |
| | | CTGTT | CUGUU |
| | | TGTCG | UGUCG |
| | Ex4 SA1 | CCACC | CCACC |
| | (Pos 5) | TGGGA | UGGGA |
| | | AGGGA | AGGGA |
| | | AGGAG | AGGAG |
| | Ex4 SA2 | ACCAC | ACCAC |
| | (Pos 6) | CTGGG | CUGGG |
| | | AAGGG | AAGGG |
| | | AAGGA | AAGGA |
| | Ex4 SA3 | CACCA | CACCA |
| | (Pos 7) | CCTGG | CCUGG |
| | | GAAGG | GAAGG |
| | | GAAGG | GAAGG |
| | Ex5 SA1 | GTCCT | GUCCU |
| | (Pos 4) | GTGGG | GUGGG |
| | | AAGCA | AAGCA |
| | | GTGGC | GUGGC |
| | Ex5 SA2 | AGTTG | AGUUG |
| | (Pos 8) | TCCTG | UCCUG |
| | | TGGGA | UGGGA |
| | | AGCAG | AGCAG |
| | Ex6 SA1 | CTCAC | CUCAC |
| | (Pos 5) | TGATG | UGAUG |
| | | GGGAC | GGGAC |
| | | AAATG | AAAUG |
| | Ex6 SA2 | GCTCA | GCUCA |
| | (Pos 6) | CTGAT | CUGAU |
| | | GGGGA | GGGGA |
| | | CAAAT | CAAAU |
| | Ex6 SA3 | GGCTC | GGCUC |
| | (Pos 7) | ACTGA | ACUGA |
| | | TGGGG | UGGGG |
| | | ACAAA | ACAAA |
| | Ex6 SD1 | GCACC | GCACC |
| | (Pos 4) | TGAAT | UGAAU |
| | | GTAGC | GUAGC |
| | | CCTGC | CCUGC |
| | Ex7 SA1 | TCACC | UCACC |
| | (Pos 7) | TGTGG | UGUGG |
| | | GCACA | GCACA |
| | | AGAAC | AGAAC |
| | Ex8 SA1 | AGCCC | AGCCC |
| | (Pos 5) | TGGAG | UGGAG |
| | | CAAGA | CAAGA |
| | | TGGGG | UGGGG |
| | Ex8 SA2 | TAGCC | UAGCC |
| | (Pos 6) | CTGGA | CUGGA |
| | | GCAAG | GCAAG |
| | | ATGGG | AUGGG |
| | Ex8 SA3 | GTAGC | GUAGC |
| | (Pos 7) | CCTGG | CCUGG |
| | | AGCAA | AGCAA |
| | | GATGG | GAUGG |
| | Ex8 SA4 | TGTAG | UGUAG |
| | (Pos 8) | CCCTG | CCCUG |
| | | GAGCA | GAGCA |
| | | AGATG | AGAUG |
| | Ex8 SA5 | TTGTA | UUGUA |
| | (Pos 9) | GCCCT | GCCCU |
| | | GGAGC | GGAGC |
| | | AAGAT | AAGAU |
| | Ex9 SA1 | CACCT | CACCU |
| | (Pos 4) | GGAGG | GGAGG |
| | | AAGGG | AAGGG |
| | | GTACA | GUACA |
| | Ex9 SD1 | GCCCA | GCCCA |
| | (Pos 6) | CCTTC | CCUUC |
| | | CTCTG | CUCUG |
| | | GTAGA | GUAGA |
| | Ex1 STOP1 | GGAGC | GGAGC |
| | (Pos 5) | GGGGG | GGGGG |
| | | GGAGA | GGAGA |
| | | AGCGG | AGCGG |
| | Ex1 STOP2 | AAACA | AAACA |
| | (Pos 4) | AAAGG | AAAGG |
| | | AGATA | AGAUA |
| | | TCAAG | UCAAG |
| PTEN | Ex2 | ATATC | AUAUC |
| | (SA1 | TGAGT | UGAGU |
| | (Pos 5) | ACTTT | ACUUU |
| | | AGTTA | AGUUA |
| | Ex4 SD1 | CCTAC | CCUAC |
| | (Pos 5) | CTCTG | CUCUG |
| | | CAATT | CAAUU |
| | | AAATT | AAAUU |
| | Ex5 SD1 | ATAAC | AUAAC |
| | (Pos 9) | TTACC | UUACC |
| | | TTTTT | UUUUU |
| | | GTCTC | GUCUC |
| | Ex1 STOP1 pos 8) | TCGCT | UCGCU |
| | | GGCAG | GGCAG |
| | | CCGCT | CCGCU |
| | | GTACT | GUACU |
| PTPN2 | Ex6 SA1 | ACTCT | ACUCU |
| | (Pos 4) | AAAAA | AAAAA |
| | | GTGAA | GUGAA |
| | | AATCA | AAUCA |
| | Ex9 STOP1 | AGGTG | AGGUG |
| | (pos 6) | CAGCA | CAGCA |
| | | GATGA | GAUGA |
| | | AACAG | AACAG |
| | Ex2 SA1 | ACCAC | ACCAC |
| | (Pos 6) | CTGGG | CUGGG |
| | | CGGCC | CGGCC |
| | | CAGGC | CAGGC |
| | Ex2 SA2 | CCACC | CCACC |
| | (Pos 5) | TGGGC | UGGGC |
| | | GGCCC | GGCCC |
| | | AGGCA | AGGCA |
| | Ex3 SA1 | CCCCC | CCCCC |
| | (Pos 9) | ACCCT | ACCCU |
| | | GCAGG | GCAGG |
| | | GCACC | GCACC |
| | Ex3 SA2 | CCACC | CCACC |
| | (Pos 6) | CTGCA | CUGCA |
| | | GGGCA | GGGCA |
| | | CCAGG | CCAGG |
| | Ex3 SD1 | AGCCC | AGCCC |
| | (pos 9) | TCACC | UCACC |
| | | TCTCA | UCUCA |
| | | CTAGT | CUAGU |
| | Ex4 SA1 | CACCT | CACCU |
| | (Pos 4) | AGAGA | AGAGA |
| | | AGGCA | AGGCA |
| | | GCGTC | GCGUC |
| | Ex5 SA1 | ACCCT | ACCCU |
| | (Pos 4) | GGGGG | GGGGG |
| | | GAGCC | GAGCC |
| | | AAATT | AAAUU |
| | Ex7 SA1 | CAAAC | CAAAC |
| | (Pos 7) | TCTGA | UCUGA |
| | | GATGT | GAUGU |
| | | GGGTG | GGGUG |
| | Ex7 SA1 | GCAAA | GCAAA |
| | (Pos 8) | CTCTG | CUCUG |
| | | AGATG | AGAUG |
| | | TGGGT | UGGGU |
| | Ex8 SA1 | TCAAC | UCAAC |
| | (Pos 5) | TGGGA | UGGGA |
| | | GTGGG | GUGGG |
| | | CGGAG | CGGAG |
| | Ex8 SD1 | ACTGC | ACUGC |
| | (Pos 9) | TGACC | UGACC |
| | | TTGAT | UUGAU |
| | | GTAGT | GUAGU |
| | Ex9 SA1 | GCTGG | GCUGG |
| | (Pos 8) | TTCTG | UUCUG |
| | | GACGC | GACGC |
| | | AAGCG | AAGCG |
| | Ex10 SA1 | TTGTT | UUGUU |
| | (Pos 6) | CTGGA | CUGGA |
| | | AAGGG | AAGGG |
| | | AGGGT | AGGGU |
| PTPN6 | Ex10 SA2 | TGTTC | UGUUC |
| | (Pos 5) | TGGAA | UGGAA |
| | | AGGGA | AGGGA |
| | | GGGTC | GGGUC |
| | Ex10 SD1 | GCCAC | GCCAC |
| | (Pos 9) | TCACA | UCACA |
| | | TTGTC | UUGUC |
| | | CAGCG | CAGCG |
| | Ex11 SA1 | CTCCC | CUCCC |
| | (Pos 5) | TAAGC | UAAGC |
| | | CGAGG | CGAGG |
| | | ACATA | ACAUA |
| | Ex11 SA2 | TCTCC | UCUCC |
| | (Pos 6) | CTAAG | CUAAG |
| | | CCGAG | CCGAG |
| | | GACAT | GACAU |
| | Ex11 SD1 | TCACC | UCACC |
| | (Pos 4) | TGCAG | UGCAG |
| | | TGCAC | UGCAC |
| | | GATGA | GAUGA |
| | Ex12 SA1 | CCGGC | CCGGC |
| | (Pos 7) | GCTGG | GCUGG |
| | | GGAAA | GGAAA |
| | | GACGG | GACGG |
| | Ex12 SA2 | GCCGG | GCCGG |
| | (Pos 8) | CGCTG | CGCUG |
| | | GGGAA | GGGAA |
| | | AGACG | AGACG |
| | Ex12 SA3 | TGCCG | UGCCG |
| | (Pos 9) | GCGCT | GCGCU |
| | | GGGGA | GGGGA |
| | | AAGAC | AAGAC |
| | Ex14 SD1 | CACTC | CACUC |
| | (Pos 7) | ACTTG | ACUUG |
| | | GACGA | GACGA |
| | | GGTGC | GGUGC |
| | Ex14 SD2 | CCACT | CCACU |
| | (Pos 8) | CACTT | CACUU |
| | | GGACG | GGACG |
| | | AGGTG | AGGUG |
| | Ex15 SA1 | TGTCT | UGUCU |
| | (Pos 4) | GCAGC | GCAGC |
| | | CGGGT | CGGGU |
| | | GCAGG | GCAGG |
| | Ex15 SA2 | GTGTC | GUGUC |
| | (Pos 5) | TGCAG | UGCAG |
| | | CCGGG | CCGGG |
| | | TGCAG | UGCAG |
| | Ex15 SA3 | TGTGT | UGUGU |
| | (Pos 6) | CTGCA | CUGCA |
| | | GCCGG | GCCGG |
| | | GTGCA | GUGCA |
| | Ex15 SD1 | CACCG | CACCG |
| | (Pos 6) | CTCAC | CUCAC |
| | | TTCCT | UUCCU |
| | | CTTGA | CUUGA |
| | Ex15 SD2 | GCACC | GCACC |
| | (Pos 7) | GCTCA | GCUCA |
| | | CTTCC | CUUCC |
| | | TCTTG | UCUUG |
| | Ex3 SA1 | TTTCT | UUUCU |
| | (Pos 7) | TCTAA | UCUAA |
| | | AATAG | AAUAG |
| | | TCCAT | UCCAU |
| PTPN11 | Ex3 SD1 | GTTAC | GUUAC |
| | (Pos 9) | TGACC | UGACC |
| | | TTTCA | UUUCA |
| | | GAGGT | GAGGU |
| | Ex13 SD1 | ACTAC | ACUAC |
| | (Pos 9) | TTACT | UUACU |
| | | CTGCA | CUGCA |
| | | CAGGG | CAGGG |
| RASA2 | Ex2 SA1 | GACCT | GACCU |
| | (Pos 4) | AAAAT | AAAAU |
| | | ATAAA | AUAAA |
| | | AAATT | AAAUU |
| | Ex5 SD1 | ATTTA | AUUUA |
| | (pos 6) | CCTGA | CCUGA |
| | | ACCTC | ACCUC |
| | | TGAAT | UGAAU |
| | Ex6 SD1 | CTTAC | CUUAC |
| | (Pos 5) | TGTAC | UGUAC |
| | | AACAA | AACAA |
| | | GCTGC | GCUGC |
| | Ex10 SA1 | CGATC | CGAUC |
| | (Pos 6) | CTGAA | CUGAA |
| | | AAUGA | AAUUG |
| | | AAAC | AAAAC |
| | Ex10 SD1 | CCCUA | CCCUU |
| | (Pos 7) | CCAGG | ACCAG |
| | | CUGAT | GCUUG |
| | | GAG | AUGAG |
| | Ex12 SA1 | GATAU | GAUAU |
| | (Pos 9) | GGCTA | UGGCU |
| | | AATAC | AAAUA |
| | | AGAA | CAGAA |
| | Ex13 SD1 | UCTGT | UUCUG |
| | (Pos 8) | ACCTC | UACCU |
| | | ATCAA | CAUCA |
| | | GAAT | AGAAU |
| | Ex15 SA1 | UCTCC | UUCUC |
| | (Pos 6) | TGCAG | CUGCA |
| | | GATUA | GGAUU |
| | | AAA | UAAAA |
| | Ex16 SA1 | GGTCA | GGUCA |
| | (Pos 7) | TCTGC | UCUGC |
| | | AGGAA | AGGAA |
| | | AAAAA | AAAAA |
| | Ex19 SA1 | CAAGA | CAAGA |
| | (Pos 7) | ACTAA | ACUAA |
| | | ATGGG | AUGGG |
| | | GAAAT | GAAAU |
| SIGLEC15 | Ex3 SA1 | GGCGA | GGCGA |
| | (Pos 8) | GCCTG | GCCUG |
| | | AGGGC | AGGGC |
| | | GGGGC | GGGGC |
| | Ex3 SA2 | TGGCG | UGGCG |
| | (Pos 9) | AGCCT | AGCCU |
| | | GAGGG | GAGGG |
| | | CGGGG | CGGGG |
| | Ex3 SD1 | CCTCG | CCUCG |
| | (Pos 6) | CCTGT | CCUGU |
| | | CACGT | CACGU |
| | | GCAGC | GCAGC |
| | Ex3 STOP1 | GCGCG | GCGCG |
| | (pos 6) | CCAGA | CCAGA |
| | | TGGCC | UGGCC |
| | | GTCAG | GUCAG |
| | Ex3 STOP2 | TGCAT | UGCAU |
| | (Pos 9) | GGACC | GGACC |
| | | AGCGC | AGCGC |
| | | TGCGC | UGCGC |
| | Ex3 STOP3 | GTCCA | GUCCA |
| | (Pos 8) | TGCAG | UGCAG |
| | | GTGCC | GUGCC |
| | | ACCCG | ACCCG |
| | Ex3 STOP4 | AGCGC | AGCGC |
| | (Pos 5) | AGCGC | AGCGC |
| | | TGGTC | UGGUC |
| | | CATGC | CAUGC |
| | Ex4 SD | CGCAC | CGCAC |
| | (Pos 9) | CCACC | CCACC |
| | | TGGGC | UGGGC |
| | | GGCGG | GGCGG |
| | Ex4 SD1 | CGCGG | CGCGG |
| | (Pos 6) | CTGCA | CUGCA |
| | | GGGGA | GGGGA |
| | | GAAGG | GAAGG |
| | Ex4 SD1 | GCACC | GCACC |
| | (Pos 8) | CACCT | CACCU |
| | | GGGCG | GGGCG |
| | | GCGGC | GCGGC |
| | Ex4 SD1 | CGGCG | CGGCG |
| | (Pos 9) | CGGCT | CGGCU |
| | | GCAGG | GCAGG |
| | | GGAGA | GGAGA |
| | Ex4 SD3 | GCGGC | GCGGC |
| | (Pos 5) | TGCAG | UGCAG |
| | | GGGAG | GGGAG |
| | | AAGGC | AAGGC |
| | Ex4 STOP1 | GGGCC | GGGCC |
| | (Pos 9) | GGACC | GGACC |
| | | AGGCG | AGGCG |
| | | AGGGC | AGGGC |
| | Ex4 STOP2 | CCGGA | CCGGA |
| | (Pos 6) | CCAGG | CCAGG |
| | | CGAGG | CGAGG |
| | | GCGGG | GCGGG |
| | Ex6 STOP1 | ATUGA | AUUUG |
| | (Pos 9) | GCCAG | AGCCA |
| | | ATGAA | GAUGA |
| | | CCCC | ACCCC |
| SLA | Ex2 SD1 | UACCC | UUACC |
| | (pos 4) | TCCGG | CUCCG |
| | | GUGGG | GGUUG |
| | | CAG | GGCAG |
| | Ex2 SD2 | CTTAC | CUUAC |
| | (Pos 5) | CCTCC | CCUCC |
| | | GGGUG | GGGUU |
| | | GGCA | GGGCA |
| | Ex3 SA1 | GTCCT | GUCCU |
| | (Pos 4)) | GGGGA | GGGGA |
| | | AACAA | AACAA |
| | | AGGCA | AGGCA |
| | Ex3 SA2 | ATCCA | AUCCA |
| | (pos 9) | GTCCT | GUCCU |
| | | GGGGA | GGGGA |
| | | AACAA | AACAA |
| | Ex4 SD1 | TACTC | UACUC |
| | (Pos 7) | ACCCA | ACCCA |
| | | TGGTA | UGGUA |
| | | AACTC | AACUC |
| | Ex6 SA1 | TAAAA | UAAAA |
| | (Pos 8) | CCCTG | CCCUG |
| | | CAGGA | CAGGA |
| | | GGTGG | GGUGG |
| | Ex8 SA1 | AGTCT | AGUCU |
| | (Pos 4) | GTGGG | GUGGG |
| | | CCAGA | CCAGA |
| | | AGAAA | AGAAA |
| | Ex1 SD1 | ACTCA | ACUCA |
| | (Pos 6) | CCTGT | CCUGU |
| | | GAGCT | GAGCU |
| | | GCCAA | GCCAA |
| SLAMF7 | Ex1 STOP1 | GCTGC | GCUGC |
| | (Pos 5) | CAAAG | CAAAG |
| | | GATAT | GAUAU |
| | | AGATG | AGAUG |
| | Ex1 STOP2 | CTGCC | CUGCC |
| | (Pos 4) | AAAGG | AAAGG |
| | | ATATA | AUAUA |
| | | GATGA | GAUGA |
| | Ex3 SD1 | GTCAC | GUCAC |
| | (Pos 5) | CUCAC | CUUCA |
| | | AGAGC | CAGAG |
| | | UCC | CUUCC |
| | Ex3 SD2 | CAGCA | CAGCA |
| | (Pos 7) | CCUCA | CCUUC |
| | | GAGAA | AGAGA |
| | | TGGG | AUGGG |
| | Ex3 SD3 | CACCU | CACCU |
| | (Pos 4) | CAGAG | UCAGA |
| | | AATGG | GAAUG |
| | | GTGG | GGUGG |
| | Ex4 SD1 | ATGTA | AUGUA |
| | (Pos 8) | CTCTA | CUCUA |
| | | AAAGC | AAAGC |
| | | AAGU | AAGUU |
| | Ex4 SD2 | AATGT | AAUGU |
| | (Pos 9) | ACTCT | ACUCU |
| | | AAAAG | AAAAG |
| | | CAAGT | CAAGU |
| SOCS1 | Ex1 STOP1 | CGCTG | CGCUG |
| | (Pos 9) | CGCCA | CGCCA |
| | | GCGCC | GCGCC |
| | | GCGTG | GCGUG |
| | Ex1 STOP2 | GGGCC | GGGCC |
| | (Pos 7) | CCCAG | CCCAG |
| | | TAGAA | UAGAA |
| | | TCCGC | UCCGC |
| STK4 | Ex1 SD1 | CTTAC | CUUAC |
| | (Pos 9) | CTACC | CUACC |
| | | TCCCA | UCCCA |
| | | ATGTC | AUGUC |
| | Ex1 SA2 | CTGCA | CUGCA |
| | (Pos 7) | TCTAC | UCUAC |
| | | AGTAA | AGUAA |
| | | TCTGA | UCUGA |
| | Ex5 SA1 | ATGGT | AUGGU |
| | (Pos 9) | ATCCT | AUCCU |
| | | AAAAT | AAAAU |
| | | AGAAA | AGAAA |
| | Ex6 SD1 | TCATA | UCAUA |
| | (Pos 6) | CCTGC | CCUGC |
| | | AGGAG | AGGAG |
| | | CTGAG | CUGAG |
| | Ex9 SA1 | TAAGC | UAAGC |
| | (Pos 5) | TAGAA | UAGAA |
| | | GAGAA | GAGAA |
| | | GTGGA | GUGGA |
| | Ex9 SA2 | CTCTT | CUCUU |
| | (Pos 9) | AAGCT | AAGCU |
| | | AGAAG | AGAAG |
| | | AGAAG | AGAAG |
| SUV39H1 | Ex2 SA1 | GCTGC | GCUGC |
| | (Pos 9) | AGCCT | AGCCU |
| | | GGATC | GGAUC |
| | | AAGCG | AAGCG |
| | Ex2 STOP1 | GCTGC | GCUGC |
| | (Pos 5) | AGGAC | AGGAC |
| | | CTGTG | CUGUG |
| | | CCGCC | CCGCC |
| | Ex3 SA1 | TTCCT | UUCCU |
| | (Pos 4) | GTTGG | GUUGG |
| | | GGGTG | GGGUG |
| | | GGTAG | GGUAG |
| | Ex3 SA2 | GTTCC | GUUCC |
| | (Pos 5) | TGTTG | UGUUG |
| | | GGGGT | GGGGU |
| | | GGGTA | GGGUA |
| | Ex3 SA3 | TGTTC | UGUUC |
| | (Pos 5) | CTGTT | CUGUU |
| | | GGGGG | GGGGG |
| | | TGGGT | UGGGU |
| | Ex3 STOP1 | ACAGG | ACAGG |
| | (Pos8) | AACAG | AACAG |
| | | GAATA | GAAUA |
| | | TTACC | UUACC |
| | Ex3 STOP2 | GATAT | GAUAU |
| | (Pos 6) | CCACG | CCACG |
| | | CCATT | CCAUU |
| | | TCACC | UCACC |
| TMEM222 | Ex1 SD1 | ACTCA | ACUCA |
| | (Pos 6) | CGTGA | CGUGA |
| | | GCACC | GCACC |
| | | GGGAT | GGGAU |
| | Ex1 SD2 | GACTC | GACUC |
| | (Pos 7) | ACGTG | ACGUG |
| | | AGCAC | AGCAC |
| | | CGGGA | CGGGA |
| | Ex2 SA1 | CACCT | CACCU |
| | (Pos 4) | GTGAG | GUGAG |
| | | GAAAA | GAAAA |
| | | GGACG | GGACG |
| | Ex2 SA2 | CCACC | CCACC |
| | (Pos 5) | TGTGA | UGUGA |
| | | GGAAA | GGAAA |
| | | AGGAC | AGGAC |
| | Ex2 SD1 | GACTC | GACUC |
| | (Pos 7) | ACTGA | ACUGA |
| | | GACAA | GACAA |
| | | AGTAG | AGUAG |
| | Ex2 SA3 | ACCAC | ACCAC |
| | (Pos 6) | CTGTG | CUGUG |
| | | AGGAA | AGGAA |
| | | AAGGA | AAGGA |
| | Ex2 SD2 | GGACT | GGACU |
| | (Pos 8) | CACTG | CACUG |
| | | AGACA | AGACA |
| | | AAGTA | AAGUA |
| | Ex2 SD3 | GGGAC | GGGAC |
| | (Pos 9) | TCACT | UCACU |
| | | GAGAC | GAGAC |
| | | AAAGT | AAAGU |
| | Ex3 SD1 | TTACT | UUACU |
| | (Pos 4) | TGGCA | UGGCA |
| | | GGCTT | GGCUU |
| | | TCCAA | UCCAA |
| | Ex4 SA1 | CAGTA | CAGUA |
| | (Pos 6) | CCTGG | CCUGG |
| | | GGGGA | GGGGA |
| | | GAGAA | GAGAA |
| | Ex4 SA1 | CCAGT | CCAGU |
| | (Pos 7) | ACCTG | ACCUG |
| | | GGGGG | GGGGG |
| | | AGAGA | AGAGA |
| | Ex5 SA1 | TTGTG | UUGUG |
| | (Pos 6) | CTGGA | CUGGA |
| | | GGCAC | GGCAC |
| | | CAGAA | CAGAA |
| | Ex6 SA2 | ATTGT | AUUGU |
| | (Pos 7) | GCTGG | GCUGG |
| | | AGGCA | AGGCA |
| | | CCAGA | CCAGA |
| | Ex7 SA1 | CCCAA | CCCAA |
| | (Pos 8) | CGCTG | CGCUG |
| | | ACAGA | ACAGA |
| | | GAGAA | GAGAA |
| TNFAIP3 | Ex2 SA1 | GTCAC | GUCAC |
| | (Pos 6) | CTGAG | CUGAG |
| | | GACAG | GACAG |
| | | AAAGG | AAAGG |
| | Ex2 SA2 | GCCGT | GCCGU |
| | (Pos 9) | CACCT | CACCU |
| | | GAGGA | GAGGA |
| | | CAGAA | CAGAA |
| | Ex3 SA1 | TTCCA | UUCCA |
| | (Pos 9) | GTTCT | GUUCU |
| | | AAGGG | AAGGG |
| | | GAGCG | GAGCG |
| | Ex3 SD1 | TCACC | UCACC |
| | (pos 4) | TGAAA | UGAAA |
| | | TGACA | UGACA |
| | | ATGAT | AUGAU |
| | Ex6 SA1 | CATCC | CAUCC |
| | (pos 9) | AACCT | AACCU |
| | | GAAGA | GAAGA |
| | | CCAAA | CCAAA |
| | Ex8 SA1 | GATCT | GAUCU |
| | (Pos 6) | CTGAG | CUGAG |
| | | TGGAA | UGGAA |
| | | AGAAC | AGAAC |
| TNFRSF8 | Exon 1 ATG | AGGAC | AGGAC |
| (CD30) | | GCGCA | GCGCA |
| | | TCCCC | UCCCC |
| | | GGGGC | GGGGC |
| | Exon 1 STOP 2 | TCCCA | UCCCA |
| | | CAGGT | CAGGU |
| | | AAGCG | AAGCG |
| | | GGTGA | GGUGA |
| | Exon 1 STOP 1 | GGCGC | GGCGC |
| | | TACGA | UACGA |
| | | GCCTT | GCCUU |
| | | CCCAC | CCCAC |
| | Exon 2 SD | CCCAC | CCCAC |
| | | TCACC | UCACC |
| | | CATGG | CAUGG |
| | | GGCAG | GGCAG |
| | Exon 3 STOP | CGACA | CGACA |
| | | CAGCA | CAGCA |
| | | GTGCC | GUGCC |
| | | CACAG | CACAG |
| | Exon 4 SA 3 | GTCGT | GUCGU |
| | | CTAAG | CUAAG |
| | | GGACA | GGACA |
| | | CAGAC | CAGAC |
| | Exon 4 SA 2 | TCGTC | UCGUC |
| | | TAAGG | UAAGG |
| | | GACAC | GACAC |
| | | AGACA | AGACA |
| | Exon 4 SA 1 | CGTCT | CGUCU |
| | | AAGGG | AAGGG |
| | | ACACA | ACACA |
| | | GACAG | GACAG |
| | Exon 6 STOP | CCCCC | CCCCC |
| | | AGGCC | AGGCC |
| | | AAGCC | AAGCC |
| | | CACCC | CACCC |
| | Exon 6 SD | AAATT | AAAUU |
| | | ACCTG | ACCUG |
| | | GATCT | GAUCU |
| | | GAACT | GAACU |
| | Exon 8 SA | TCATC | UCAUC |
| | | TAAGG | UAAGG |
| | | GACAC | GACAC |
| | | AGATG | AGAUG |
| | Exon 10 SA | GTGCT | GUGCU |
| | | GCGGG | GCGGG |
| | | GAGAA | GAGAA |
| | | GCCCA | GCCCA |
| | Exon 10 SD 2 | ACCAT | ACCAU |
| | | TACCT | UACCU |
| | | GCATC | GCAUC |
| | | CAGAA | CAGAA |
| | Exon 10 SD 1 | CCATT | CCAUU |
| | | ACCTG | ACCUG |
| | | CATCC | CAUCC |
| | | AGAAC | AGAAC |
| | Exon 10 STOP | CCCCA | CCCCA |
| | | CTCAG | CUCAG |
| | | AGCTT | AGCUU |
| | | GCTGG | GCUGG |
| | Exon 11 STOP 1 | ACCCA | ACCCA |
| | | GAAGA | GAAGA |
| | | GCACT | GCACU |
| | | GGCCC | GGCCC |
| | Exon 11 STOP 2 | AGGAT | AGGAU |
| | | CACCC | CACCC |
| | | AGAAG | AGAAG |
| | | AGCAC | AGCAC |
| | Exon 12 SA 2 | TGGAG | UGGAG |
| | | CTCTG | CUCUG |
| | | AAACG | AAACG |
| | | ACACC | ACACC |
| | Exon 12 SA 1 | AGCTC | AGCUC |
| | | TGAAA | UGAAA |
| | | CGACA | CGACA |
| | | CCAGG | CCAGG |
| | Exon 12 SD 2 | CTCAC | CUCAC |
| | | CCACA | CCACA |
| | | AGCTC | AGCUC |
| | | TAGCT | UAGCU |
| | Exon 12 SD 1 | TCACC | UCACC |
| | | CACAA | CACAA |
| | | GCTCT | GCUCU |
| | | AGCTT | AGCUU |
| | Exon 13 SD 2 | ACTTA | ACUUA |
| | | CCGTT | CCGUU |
| | | GAGCT | GAGCU |
| | | CCTCC | CCUCC |
| | Exon 13 SD 1 | CTTAC | CUUAC |
| | | CGTTG | CGUUG |
| | | AGCTC | AGCUC |
| | | CTCCT | CUCCU |
| | Exon 14 SA 1 | AGCTG | AGCUG |
| | | CTGTG | CUGUG |
| | | GGACG | GGACG |
| | | GGAAT | GGAAU |
| | Exon 14 SA 2 | CAGCT | CAGCU |
| | | GCTGT | GCUGU |
| | | GGGAC | GGGAC |
| | | GGGAA | GGGAA |
| | iso exon 11 SA | CTCCT | CUCCU |
| | | CAGCT | CAGCU |
| | | GCTGT | GCUGU |
| | | GGGAC | GGGAC |
| | Exon 14 STOP | GCCGC | GCCGC |
| | | TGCAG | UGCAG |
| | | GATGC | GAUGC |
| | | CAGCC | CAGCC |
| | Exon 14 SD | TGACT | UGACU |
| | | CACCA | CACCA |
| | | ATCTT | AUCUU |
| | | GTTAT | GUUAU |
| | Exon 15 SA 1 | TCTCT | UCUCU |
| | | GCAAG | GCAAG |
| | | GCAAA | GCAAA |
| | | AGGAT | AGGAU |
| | Exon 15 SA 2 | TTCTC | UUCUC |
| | | TGCAA | UGCAA |
| | | GGCAA | GGCAA |
| | | AAGGA | AAGGA |
| TNFRSF10B | Ex1 SD1 | ACTCA | ACUCA |
| | (Pos 6) | CCAAC | CCAAC |
| | | AGCAG | AGCAG |
| | | GACCG | GACCG |
| | Ex2 SA1 | GAGAC | GAGAC |
| | (Pos 6) | CTGTG | CUGUG |
| | | GGGAC | GGGAC |
| | | AAAGC | AAAGC |
| | Ex 3 SD1 | CTCAC | CUCAC |
| | (Pos 5) | CCTGT | CCUGU |
| | | GCGGC | GCGGC |
| | | ACTTC | ACUUC |
| | Ex4 SA1 | ACACC | ACACC |
| | (Pos 5) | TGGGT | UGGGU |
| | | ACACA | ACACA |
| | | CACAG | CACAG |
| | Ex6 SA1 | TGAGC | UGAGC |
| | (Pos 7) | TCTGG | UCUGG |
| | | AAAAA | AAAAA |
| | | GACAT | GACAU |
| | Ex8 SA1 | CCGGT | CCGGU |
| | (pos 8) | TCCTG | UCCUG |
| | | TAACA | UAACA |
| | | CATAG | CAUAG |
| | Ex8 SA2 | CGGTT | CGGUU |
| | (Pos 7) | CCTGT | CCUGU |
| | | AACAC | AACAC |
| | | ATAGT | AUAGU |
| TOX | Exon 1 SD 3 | GTTCA | GUUCA |
| | | CCTTG | CCUUG |
| | | TTGCA | UUGCA |
| | | ATAGT | AUAGU |
| | Exon 1 SD 2 | TTCAC | UUCAC |
| | | CTTGT | CUUGU |
| | | TGCAA | UGCAA |
| | | TAGTA | UAGUA |
| | Exon 1 SD 1 | TCACC | UCACC |
| | | TTGTT | UUGUU |
| | | GCAAT | GCAAU |
| | | AGTAG | AGUAG |
| | Exon 4 STOP | TCACA | UCACA |
| | | GCTAA | GCUAA |
| | | GTGCT | GUGCU |
| | | CAACT | CAACU |
| | Exon 5 STOP 1 | TGATA | UGAUA |
| | | CTCAG | CUCAG |
| | | GCCGC | GCCGC |
| | | CATCA | CAUCA |
| | Exon 5 STOP 2 | GATAC | GAUAC |
| | | TCAGG | UCAGG |
| | | CCGCC | CCGCC |
| | | ATCAA | AUCAA |
| | Exon 5 STOP 3 | GAGAA | GAGAA |
| | | GAGCA | GAGCA |
| | | AAAAC | AAAAC |
| | | AGGTA | AGGUA |
| | Exon 5 STOP 4 | AGAAG | AGAAG |
| | | AGCAA | AGCAA |
| | | AAACA | AAACA |
| | | GGTAA | GGUAA |
| | Exon 5 SD | CGTTA | CGUUA |
| | | CCTTG | CCUUG |
| | | GATAC | GAUAC |
| | | AAGGC | AAGGC |
| | Exon 7 STOP 1 | TCACC | UCACC |
| | | ATGCA | AUGCA |
| | | GCAGC | GCAGC |
| | | CCCTT | CCCUU |
| | Exon 7 STOP 2 | TGGGA | UGGGA |
| | | ACCAG | ACCAG |
| | | CTCCC | CUCCC |
| | | CATGC | CAUGC |
| | Exon 7 STOP 3 | CATGC | CAUGC |
| | | AGCAA | AGCAA |
| | | GTAAG | GUAAG |
| | | TGCAA | UGCAA |
| | Exon 7 SD 2 | TGCAC | UGCAC |
| | | TTACT | UUACU |
| | | TGCTG | UGCUG |
| | | CATGG | CAUGG |
| | Exon 7 SD 1 | GCACT | GCACU |
| | | TACTT | UACUU |
| | | GCTGC | GCUGC |
| | | ATGGT | AUGGU |
| | Exon 8 STOP 1 | AGCTG | AGCUG |
| | | CACAA | CACAA |
| | | GTTGT | GUUGU |
| | | CACCC | CACCC |
| | Exon 8 STOP 2 | CTCCC | CUCCC |
| | | CCACA | CCACA |
| | | ACCGG | ACCGG |
| | | TGGAC | UGGAC |
| | Exon 8 STOP 6 | TTATT | UUAUU |
| | | CCAGT | CCAGU |
| | | CCACC | CCACC |
| | | GGTTG | GGUUG |
| | Exon 8 STOP 5 | TATTC | UAUUC |
| | | CAGTC | CAGUC |
| | | CACCG | CACCG |
| | | GTTGT | GUUGU |
| | Exon 8 STOP 4 | ATTCC | AUUCC |
| | | AGTCC | AGUCC |
| | | ACCGG | ACCGG |
| | | TTGTG | UUGUG |
| | Exon 8 STOP 3 | TTCCA | UUCCA |
| | | GTCCA | GUCCA |
| | | CCGGT | CCGGU |
| | | TGTGG | UGUGG |
| TOX2 | Exon 1 ATG 1 | GTCCA | GUCCA |
| | | TGGCG | UGGCG |
| | | GGCGC | GGCGC |
| | | GGCGG | GGCGG |
| | Exon 1 ATG 2 | GACGT | GACGU |
| | | CCATG | CCAUG |
| | | GCGGG | GCGGG |
| | | CGCGG | CGCGG |
| | Exon 2 STOP 1 | TATGC | UAUGC |
| | | AGCAG | AGCAG |
| | | ACTCG | ACUCG |
| | | CACAG | CACAG |
| | Exon 2 STOP 2 | TTTCC | UUUCC |
| | | GCAGA | GCAGA |
| | | AGGTA | AGGUA |
| | | AGCAG | AGCAG |
| | Exon 3 SA 2 | TCAAA | UCAAA |
| | | CTAGA | CUAGA |
| | | ATAGA | AUAGA |
| | | GAGAG | GAGAG |
| | Exon 3 SA 1 | CAAAC | CAAAC |
| | | TAGAA | UAGAA |
| | | TAGAG | UAGAG |
| | | AGAGA | AGAGA |
| | Exon 3 SD | CACCC | CACCC |
| | | ACCTG | ACCUG |
| | | GCTGG | GCUGG |
| | | TTGAC | UUGAC |
| | Exon 5 SD | TGGAT | UGGAU |
| | | CTAAG | CUAAG |
| | | AGAGG | AGAGG |
| | | AGGAC | AGGAC |
| | Exon 5 STOP 1 | GATCC | GAUCC |
| | | AGGAG | AGGAG |
| | | ATGGT | AUGGU |
| | | CCACT | CCACU |
| | Exon 5 STOP 2 | GTCCC | GUCCC |
| | | AGCTC | AGCUC |
| | | ATCTC | AUCUC |
| | | GCAGA | GCAGA |
| | Exon 5 STOP 3 | TCATC | UCAUC |
| | | TCGCA | UCGCA |
| | | GATGG | GAUGG |
| | | GCATC | GCAUC |
| | Exon 5 STOP 4 | CTCCA | CUCCA |
| | | CTCAG | CUCAG |
| | | GAAGA | GAAGA |
| | | GGAGT | GGAGU |
| | Exon 6 STOP 1 | TGAGC | UGAGC |
| | | CGCAG | CGCAG |
| | | AAGCC | AAGCC |
| | | TGTGT | UGUGU |
| | Exon 6 STOP 2 | AGACA | AGACA |
| | | CTCAG | CUCAG |
| | | GCCGC | GCCGC |
| | | CATCA | CAUCA |
| | Exon 6 STOP 3 | GACAC | GACAC |
| | | TCAGG | UCAGG |
| | | CCGCC | CCGCC |
| | | ATCAA | AUCAA |
| | Exon 8 STOP 1 | GACCT | GACCU |
| | | GCAGG | GCAGG |
| | | CCTTC | CCUUC |
| | | CGCAG | CGCAG |
| | Exon 8 STOP 2 | ACCTG | ACCUG |
| | | CAGGC | CAGGC |
| | | CTTCC | CUUCC |
| | | GCAGT | GCAGU |
| | Exon 8 STOP 3 | CCTGC | CCUGC |
| | | AGGCC | AGGCC |
| | | TTCCG | UUCCG |
| | | CAGTG | CAGUG |
| | Exon 8 SD | CTGCT | CUGCU |
| | | TACCT | UACCU |
| | | GTGGC | GUGGC |
| | | CCTGG | CCUGG |
| | Exon 9 SA 2 | GGAAG | GGAAG |
| | | TCCTA | UCCUA |
| | | CAGAG | CAGAG |
| | | TGGGA | UGGGA |
| | Exon 9 SA 1 | AGTCC | AGUCC |
| | | TACAG | UACAG |
| | | AGTGG | AGUGG |
| | | GAAGG | GAAGG |
| | Exon 9 STOP 2 | GTCCC | GUCCC |
| | | AGTCC | AGUCC |
| | | CCGCT | CCGCU |
| | | GCTGG | GCUGG |
| | Exon 9 STOP 1 | TCCCA | UCCCA |
| | | GTCCC | GUCCC |
| | | CGCTG | CGCUG |
| | | CTGGT | CUGGU |
| | Exon 9 STOP 3 | GCTGT | GCUGU |
| | | CCCAG | CCCAG |
| | | TCCCC | UCCCC |
| | | GCTGC | GCUGC |
| | Exon 10 SA 1 | CAGGC | CAGGC |
| | | TGTGA | UGUGA |
| | | GAGAG | GAGAG |
| | | AGGAG | AGGAG |
| | Exon 10 SA 2 | GCAGG | GCAGG |
| | | CTGTG | CUGUG |
| | | AGAGA | AGAGA |
| | | GAGGA | GAGGA |
| | Exon 10 SA 3 | AGCAG | AGCAG |
| | | GCTGT | GCUGU |
| | | GAGAG | GAGAG |
| | | AGAGG | AGAGG |
| UBASH3A | Ex1 SD1 | TGCCA | UGCCA |
| | (Pos 7) | TCTCT | UCUCU |
| | | TCCTG | UCCUG |
| | | CCCTT | CCCUU |
| | Ex1 SD1 | GTACT | GUACU |
| | (Pos8) | CACGC | CACGC |
| | | GGTGT | GGUGU |
| | | GCACC | GCACC |
| | Ex5 SA1 | GGAAG | GGAAG |
| | (Pos 9) | TGCCT | UGCCU |
| | | GGGTG | GGGUG |
| | | AGGAC | AGGAC |
| | Ex7 SA1 | AGGGT | AGGGU |
| | (Pos 6) | CTAGA | CUAGA |
| | | AAAGA | AAAGA |
| | | GGCAA | GGCAA |
| | Ex7 SA2 | GGGTC | GGGUC |
| | (Pos 5) | TAGAA | UAGAA |
| | | AAGAG | AAGAG |
| | | GCAAA | GCAAA |
| | Ex7 SA3 | GGTCT | GGUCU |
| | (Pos 4) | AGAAA | AGAAA |
| | | AGAGG | AGAGG |
| | | CAAAG | CAAAG |
| | Ex9 SA1 | GGTAG | GGUAG |
| | (Pos 7) | CCTGG | CCUGG |
| | | GGGGT | GGGGU |
| | | GGGGC | GGGGC |
| | Ex11 SA1 | CCCCT | CCCCU |
| | (Pos 4) | GGAAA | GGAAA |
| | | ATAGT | AUAGU |
| | | GAAAA | GAAAA |
| | Ex11 SD1 | CTGAC | CUGAC |
| | (Pos 5) | CTTCC | CUUCC |
| | | AGGAT | AGGAU |
| | | GAGTT | GAGUU |
| | Ex11 SD2 Pos | GAGGT | GAGGU |
| | (7) | TCTCA | UCUCA |
| | | CTGAC | CUGAC |
| | | CTTCC | CUUCC |
| | Ex13 SA1 | GCGGG | GCGGG |
| | (Pos 7) | CCTGG | CCUGG |
| | | AAGGA | AAGGA |
| | | TGAGA | UGAGA |
| | Ex14 SD1 | GCGTA | GCGUA |
| | (Pos 6) | CCTTT | CCUUU |
| | | CTCAC | CUCAC |
| | | GAGTT | GAGUU |
| | Ex14 SD2 | CGCGT | CGCGU |
| | (Pos 7) | ACCTT | ACCUU |
| | | TCTCA | UCUCA |
| | | CGAGT | CGAGU |
| VHL | Ex1 SD1 | GGCCC | GGCCC |
| | (Pos 9) | GTACC | GUACC |
| | | TCGGT | UCGGU |
| | | AGCTG | AGCUG |
| | Ex1 STOP1 | GTCCC | GUCCC |
| | (Pos 4) | AGTTC | AGUUC |
| | | TCCGC | UCCGC |
| | | CCTCC | CCUCC |
| | Ex2 STOP1 | GGAAC | GGAAC |
| | (Pos 9) | AAGCC | AAGCC |
| | | AGGGT | AGGGU |
| | | CATGT | CAUGU |
| | Ex2 STOP2 | CAACC | CAACC |
| | (Pos 9) | CCTCC | CCUCC |
| | | ATCTC | AUCUC |
| | | CCAGC | CCAGC |
| | Ex3 SA1 | TGACC | UGACC |
| | (Pos 5) | TATCG | UAUCG |
| | | GGACA | GGACA |
| | | AGCAA | AGCAA |
| | Ex3 SD1 | AGTAC | AGUAC |
| | (Pos 5) | CTGGC | CUGGC |
| | | AGTGT | AGUGU |
| | | GATAT | GAUAU |
| | Ex4 STOP1 | ATGTG | AUGUG |
| | (Pos 6) | CAGAA | CAGAA |
| | | AGACC | AGACC |
| | | TGGAG | UGGAG |
| XBP1 | Ex1 STOP1 | GGGCA | GGGCA |
| | (Pos 4) | GCCCG | GCCCG |
| | | CCTCC | CCUCC |
| | | GCCGC | GCCGC |
| | Ex1 STOP2 | CGGCC | CGGCC |
| | (Pos 5) | AGGCC | AGGCC |
| | | CTGCC | CUGCC |
| | | GCTCA | GCUCA |

### Methods of Using Fusion Proteins Comprising a Cytidine or Adenosine Deaminase and a Cas9 Domain

[0721] Some aspects of this disclosure provide methods of using the fusion proteins, or complexes provided herein. For example, some aspects of this disclosure provide methods comprising contacting a DNA molecule with any of the fusion proteins provided herein, and with at least one guide RNA, wherein the guide RNA is about 15-100 nucleotides long and comprises a sequence of at least 10 contiguous nucleotides that is complementary to a target sequence. In some embodiments, the 3′ end of the target sequence is immediately adjacent to a canonical PAM sequence (NGG). In some embodiments, the 3′ end of the target sequence is not immediately adjacent to a canonical PAM sequence (NGG). In some embodiments, the 3′ end of the target sequence is immediately adjacent to an AGC, GAG, TTT, GTG, or CAA sequence. In some embodiments, the 3′ end of the target sequence is immediately adjacent to an NGA, NGCG, NGN, NNGRRT, NNNRRT, NGCG, NGCN, NGTN, NGTN, NGTN, or 5′ (TTTV) sequence.

[0722] In some embodiments, a fusion protein of the invention is used for mutagenizing a target of interest. In particular, a cytidine deaminase or adenosine deaminase nucleobase editor described herein is capable of making multiple mutations within a target sequence. These mutations may affect the function of the target. For example, when a cytidine deaminase or adenosine deaminase nucleobase editor is used to target a regulatory region the function of the regulatory region is altered and the expression of the downstream protein is reduced.

[0723] It will be understood that the numbering of the specific positions or residues in the respective sequences depends on the particular protein and numbering scheme used. Numbering might be different, e.g., in precursors of a mature protein and the mature protein itself, and differences in sequences from species to species may affect numbering. One of skill in the art will be able to identify the respective residue in any homologous protein and in the respective encoding nucleic acid by methods well known in the art, e.g., by sequence alignment and determination of homologous residues.

[0724] It will be apparent to those of skill in the art that in order to target any of the fusion proteins comprising a Cas9 domain and a cytidine or adenosine deaminase, as disclosed herein, to a target site, e.g., a site comprising a mutation to be edited, it is typically necessary to co-express the fusion protein together with a guide RNA, e.g., an sgRNA. As explained in more detail elsewhere herein, a guide RNA typically comprises a tracrRNA framework allowing for Cas9 binding, and a guide sequence, which confers sequence specificity to the Cas9:nucleic acid editing enzyme/domain fusion protein. Alternatively, the guide RNA and tracrRNA may be provided separately, as two nucleic acid molecules. In some embodiments, the guide RNA comprises a structure, wherein the guide sequence comprises a sequence that is complementary to the target sequence. The guide sequence is typically 20 nucleotides long. The sequences of suitable guide RNAs for targeting Cas9:nucleic acid editing enzyme/domain fusion proteins to specific genomic target sites will be apparent to those of skill in the art based on the instant disclosure. Such suitable guide RNA sequences typically comprise guide sequences that are complementary to a nucleic sequence within 50 nucleotides upstream or downstream of the target nucleotide to be edited. Some exemplary guide RNA sequences suitable for targeting any of the provided fusion proteins to specific target sequences are provided herein.

### Base Editor Efficiency

[0725] Some aspects of the disclosure are based on the recognition that any of the base editors provided herein can modify a specific nucleotide base without generating a sizable proportion of indels. An “indel”, as used herein, refers to the insertion or deletion of a nucleotide base within a nucleic acid. Such insertions or deletions can lead to frame shift mutations within a coding region of a gene. In some embodiments, it is desirable to generate base editors that efficiently modify (e.g. mutate) a specific nucleotide within a nucleic acid, without generating a large number of insertions or deletions (i.e., indels) in the nucleic acid. In some embodiments, it is desirable to generate base editors that efficiently modify (e.g. mutate or methylate) a specific nucleotide within a nucleic acid, without generating a large number of insertions or deletions (i.e., indels) in the nucleic acid. In certain embodiments, any of the base editors provided herein can generate a greater proportion of intended modifications (e.g., methylations) versus indels. In certain embodiments, any of the base editors provided herein can generate a greater proportion of intended modifications (e.g., mutations) versus indels. In some embodiments, the base editors provided herein are capable of generating a ratio of intended mutations to indels that is greater than 1:1. In some embodiments, the base editors provided herein are capable of generating a ratio of intended mutations to indels that is at least 1.5:1, at least 2:1, at least 2.5:1, at least 3:1, at least 3.5:1, at least 4:1, at least 4.5:1, at least 5:1, at least 5.5:1, at least 6:1, at least 6.5:1, at least 7:1, at least 7.5:1, at least 8:1, at least 10:1, at least 12:1, at least 15:1, at least 20:1, at least 25:1, at least 30:1, at least 40:1, at least 50:1, at least 100:1, at least 200:1, at least 300:1, at least 400:1, at least 500:1, at least 600:1, at least 700:1, at least 800:1, at least 900:1, or at least 1000:1, or more. The number of intended mutations and indels may be determined using any suitable method.

[0726] In some embodiments, the base editors provided herein can limit formation of indels in a region of a nucleic acid. In some embodiments, the region is at a nucleotide targeted by a base editor or a region within 2, 3, 4, 5, 6, 7, 8, 9, or 10 nucleotides of a nucleotide targeted by a base editor. In some embodiments, any of the base editors provided herein can limit the formation of indels at a region of a nucleic acid to less than 1%, less than 1.5%, less than 2%, less than 2.5%, less than 3%, less than 3.5%, less than 4%, less than 4.5%, less than 5%, less than 6%, less than 7%, less than 8%, less than 9%, less than 10%, less than 12%, less than 15%, or less than 20%. The number of indels formed at a nucleic acid region may depend on the amount of time a nucleic acid (e.g., a nucleic acid within the genome of a cell) is exposed to a base editor. In some embodiments, a number or proportion of indels is determined after at least 1 hour, at least 2 hours, at least 6 hours, at least 12 hours, at least 24 hours, at least 36 hours, at least 48 hours, at least 3 days, at least 4 days, at least 5 days, at least 7 days, at least 10 days, or at least 14 days of exposing a nucleic acid (e.g., a nucleic acid within the genome of a cell) to a base editor.

[0727] Some aspects of the disclosure are based on the recognition that any of the base editors provided herein are capable of efficiently generating an intended mutation in a nucleic acid (e.g. a nucleic acid within a genome of a subject) without generating a considerable number of unintended mutations. In some embodiments, an intended mutation is a mutation that is generated by a specific base editor bound to a gRNA, specifically designed to generate the intended mutation. In some embodiments, the intended mutation is a mutation that generates a stop codon, for example, a premature stop codon within the coding region of a gene. In some embodiments, the intended mutation is a mutation that eliminates a stop codon. In some embodiments, the intended mutation is a mutation that alters the splicing of a gene. In some embodiments, the intended mutation is a mutation that alters the regulatory sequence of a gene (e.g., a gene promotor or gene repressor). In some embodiments, any of the base editors provided herein are capable of generating a ratio of intended mutations to unintended mutations (e.g., intended mutations:unintended mutations) that is greater than 1:1. In some embodiments, any of the base editors provided herein are capable of generating a ratio of intended mutations to unintended mutations that is at least 1.5:1, at least 2:1, at least 2.5:1, at least 3:1, at least 3.5:1, at least 4:1, at least 4.5:1, at least 5:1, at least 5.5:1, at least 6:1, at least 6.5:1, at least 7:1, at least 7.5:1, at least 8:1, at least 10:1, at least 12:1, at least 15:1, at least 20:1, at least 25:1, at least 30:1, at least 40:1, at least 50:1, at least 100:1, at least 150:1, at least 200:1, at least 250:1, at least 500:1, or at least 1000:1, or more. It should be appreciated that the characteristics of the base editors described in the “Base Editor Efficiency” section, herein, may be applied to any of the fusion proteins, or methods of using the fusion proteins provided herein.

[0728] A base editing is often referred to as a “modification”, such as, a genetic modification, a gene modification and modification of the nucleic acid sequence and is clearly understandable based on the context that the modification is a base editing modification. A base editing modification is therefore a modification at the nucleotide base level, for example as a result of the deaminase activity discussed throughout the disclosure, which then results in a change in the gene sequence, and may affect the gene product. In essence therefore, the gene editing modification described herein may result in a modification of the gene, structurally and/or functionally, wherein the expression of the gene product may be modified, for example, the expression of the gene is knocked out; or conversely, enhanced, or, in some circumstances, the gene function or activity may be modified. Using the methods disclosed herein, a base editing efficiency may be determined as the knockdown efficiency of the gene in which the base editing is performed, wherein the base editing is intended to knockdown the expression of the gene. A knockdown level may be validated quantitatively by determining the expression level by any detection assay, such as assay for protein expression level, for example, by flow cytometry; assay for detecting RNA expression such as quantitative RT-PCR, northern blot analysis, or any other suitable assay such as pyrosequencing; and may be validated qualitatively by nucleotide sequencing reactions.

[0729] In some embodiments, the modification, e.g., single base edit results in at least 10% reduction of the gene targeted expression. In some embodiments, the base editing efficiency may result in at least 10% reduction of the gene targeted expression. In some embodiments, the base editing efficiency may result in at least 20% reduction of the gene targeted expression. In some embodiments, the base editing efficiency may result in at least 30% reduction of the gene targeted expression. In some embodiments, the base editing efficiency may result in at least 40% reduction of the gene targeted expression. In some embodiments, the base editing efficiency may result in at least 50% reduction of the gene targeted expression. In some embodiments, the base editing efficiency may result in at least 60% reduction of the targeted gene expression. In some embodiments, the base editing efficiency may result in at least 70% reduction of the targeted gene expression. In some embodiments, the base editing efficiency may result in at least 80% reduction of the targeted gene expression. In some embodiments, the base editing efficiency may result in at least 90% reduction of the targeted gene expression. In some embodiments, the base editing efficiency may result in at least 91% reduction of the targeted gene expression. In some embodiments, the base editing efficiency may result in at least 92% reduction of the targeted gene expression. In some embodiments, the base editing efficiency may result in at least 93% reduction of the targeted gene expression. In some embodiments, the base editing efficiency may result in at least 94% reduction of the targeted gene expression. In some embodiments, the base editing efficiency may result in at least 95% reduction of the targeted gene expression. In some embodiments, the base editing efficiency may result in at least 96% reduction of the targeted gene expression. In some embodiments, the base editing efficiency may result in at least 97% reduction of the targeted gene expression. In some embodiments, the base editing efficiency may result in at least 98% reduction of the targeted gene expression. In some embodiments, the base editing efficiency may result in at least 99% reduction of the targeted gene expression. In some embodiments, the base editing efficiency may result in knockout (100% knockdown of the gene expression) of the gene that is targeted.

[0730] In some embodiments, targeted modifications, e.g., single base editing, are used simultaneously to target at least 4, 5, 6, 7, 8, 9, 10, 11, 12 13, 14, 15, 16, 17, 18, 19, 20, 21, 22, 23, 24, 25, 26, 27, 28, 29, 30, 31, 32, 33, 34, 35, 36, 37, 38, 39, 40, 41, 42, 43, 44, 45, 46, 47, 48, 49 or 50 different endogenous sequences for base editing with different guide RNAs. In some embodiments, targeted modifications, e.g. single base editing, are used to sequentially target at least 4, 5, 6, 7, 8, 9, 10, 11, 12 13, 14, 15, 16, 17, 18, 19, 20, 21, 22, 23, 24, 25, 26, 27, 28, 29, 30, 31, 32, 33, 34, 35, 36, 37, 38, 39, 40, 41, 42, 43, 44, 45, 46, 47, 48, 49 50, or more different endogenous gene sequences for base editing with different guide RNAs.

[0731] In some embodiments, a single gene delivery event (e.g., by transduction, transfection, electroporation or any other method) can be used to target base editing of 5 sequences within a cell's genome. In some embodiments, a single gene delivery event can be used to target base editing of 6 sequences within a cell's genome. In some embodiments, a single gene delivery event can be used to target base editing of 7 sequences within a cell's genome. In some embodiments, a single electroporation event can be used to target base editing of 8 sequences within a cell's genome. In some embodiments, a single gene delivery event can be used to target base editing of 9 sequences within a cell's genome. In some embodiments, a single gene delivery event can be used to target base editing of 10 sequences within a cell's genome. In some embodiments, a single gene delivery event can be used to target base editing of 20 sequences within a cell's genome. In some embodiments, a single gene delivery event can be used to target base editing of 30 sequences within a cell's genome. In some embodiments, a single gene delivery event can be used to target base editing of 40 sequences within a cell's genome. In some embodiments, a single gene delivery event can be used to target base editing of 50 sequences within a cell's genome.

[0732] In some embodiments, the method described herein, for example, the base editing methods has minimum to no off-target effects.

[0733] In some embodiments, the base editing method described herein results in at least 50% of a cell population that have been successfully edited (i.e., cells that have been successfully engineered). In some embodiments, the base editing method described herein results in at least 55% of a cell population that have been successfully edited. In some embodiments, the base editing method described herein results in at least 60% of a cell population that have been successfully edited. In some embodiments, the base editing method described herein results in at least 65% of a cell population that have been successfully edited. In some embodiments, the base editing method described herein results in at least 70% of a cell population that have been successfully edited. In some embodiments, the base editing method described herein results in at least 75% of a cell population that have been successfully edited. In some embodiments, the base editing method described herein results in at least 80% of a cell population that have been successfully edited. In some embodiments, the base editing method described herein results in at least 85% of a cell population that have been successfully edited. In some embodiments, the base editing method described herein results in at least 90% of a cell population that have been successfully edited. In some embodiments, the base editing method described herein results in at least 95% of a cell population that have been successfully edited. In some embodiments, the base editing method described herein results in about 91%, 92%, 93%, 94%, 95%, 96%, 97%, 98%, 99% or 100% of a cell population that have been successfully edited.

[0734] In some embodiments, the live cell recovery following a base editing intervention is greater than at least 60%, 70%, 80%, 90% of the starting cell population at the time of the base editing event. In some embodiments, the live cell recovery as described above is about 70%. In some embodiments, the live cell recovery as described above is about 75%. In some embodiments, the live cell recovery as described above is about 80%. In some embodiments, the live cell recovery as described above is about 85%. In some embodiments, the live cell recovery as described above is about 90%, or about 91%, 92%, 93%, 94% 95%, 96%, 97%, 98%, or 99%, or 100% of the cells in the population at the time of the base editing event.

[0735] In some embodiments the engineered cell population can be further expanded in vitro by about 2 fold, about 3-fold, about 4-fold, about 5-fold, about 6-fold, about 7-fold, about 8-fold, about 9-fold, about 10-fold, about 15-fold, about 20-fold, about 25-fold, about 30-fold, about 35-fold, about 40-fold, about 45-fold, about 50-fold, or about 100-fold.

### Methods for Editing Nucleic Acids

[0736] Some aspects of the disclosure provide methods for editing a nucleic acid. In some embodiments, the method is a method for editing a nucleobase of a nucleic acid (e.g., a base pair of a double-stranded DNA sequence). In some embodiments, the method comprises the steps of: a) contacting a target region of a nucleic acid (e.g., a double-stranded DNA sequence) with a complex comprising a base editor (e.g., a Cas9 domain fused to a cytidine or adenosine deaminase) and a guide nucleic acid (e.g., gRNA), wherein the target region comprises a targeted nucleobase pair, b) inducing strand separation of said target region, c) converting a first nucleobase of said target nucleobase pair in a single strand of the target region to a second nucleobase, and d) cutting no more than one strand of said target region, where a third nucleobase complementary to the first nucleobase base is replaced by a fourth nucleobase complementary to the second nucleobase. In some embodiments, the method results in less than 20% indel formation in the nucleic acid. It should be appreciated that in some embodiments, step b is omitted. In some embodiments, the method results in less than 19%, 18%, 16%, 14%, 12%, 10%, 8%, 6%, 4%, 2%, 1%, 0.5% 0.2%, or less than 0.1% indel formation. In some embodiments, the method further comprises replacing the second nucleobase with a fifth nucleobase that is complementary to the fourth nucleobase, thereby generating an intended edited base pair (e.g., C-G to T-A). In some embodiments, at least 5% of the intended base pairs are edited. In some embodiments, at least 10%, 15%, 20%, 25%, 30%, 35%, 40%, 45%, or 50% of the intended base pairs are edited.

[0737] In some embodiments, the ratio of intended products to unintended products in the target nucleotide is at least 2:1, 5:1, 10:1, 20:1, 30:1, 40:1, 50:1, 60:1, 70:1, 80:1, 90:1, 100:1, or 200:1, or more. In some embodiments, the ratio of intended mutation to indel formation is greater than 1:1, 10:1, 50:1, 100:1, 500:1, or 1000:1, or more. In some embodiments, the cut single strand (nicked strand) is hybridized to the guide nucleic acid. In some embodiments, the cut single strand is opposite to the strand comprising the first nucleobase. In some embodiments, the base editor comprises a Cas9 domain. In some embodiments, the base editor protects or binds the non-edited strand. In some embodiments, the base editor comprises nickase activity. In some embodiments, the intended edited base pair is upstream of a PAM site. In some embodiments, the intended edited base pair is 1, 2, 3, 4, 5, 6, 7, 8, 9, 10, 11, 12, 13, 14, 15, 16, 17, 18, 19, or 20 nucleotides upstream of the PAM site. In some embodiments, the intended edited base pair is downstream of a PAM site. In some embodiments, the intended edited base pair is 1, 2, 3, 4, 5, 6, 7, 8, 9, 10, 11, 12, 13, 14, 15, 16, 17, 18, 19, or 20 nucleotides downstream stream of the PAM site. In some embodiments, the method does not require a canonical (e.g., NGG) PAM site. In some embodiments, the nucleobase editor comprises a linker. In some embodiments, the linker is 1-25 amino acids in length. In some embodiments, the linker is 5-20 amino acids in length. In some embodiments, linker is 10, 11, 12, 13, 14, 15, 16, 17, 18, 19, or 20 amino acids in length. In one embodiment, the linker is 32 amino acids in length. In another embodiment, a “long linker” is at least about 60 amino acids in length. In other embodiments, the linker is between about 3-100 amino acids in length. In some embodiments, the target region comprises a target window, wherein the target window comprises the target nucleobase pair. In some embodiments, the target window comprises 1-10 nucleotides. In some embodiments, the target window is 1-9, 1-8, 1-7, 1-6, 1-5, 1-4, 1-3, 1-2, or 1 nucleotides in length. In some embodiments, the target window is 1, 2, 3, 4, 5, 6, 7, 8, 9, 10, 11, 12, 13, 14, 15, 16, 17, 18, 19, or 20 nucleotides in length. In some embodiments, the intended edited base pair is within the target window. In some embodiments, the target window comprises the intended edited base pair. In some embodiments, the method is performed using any of the base editors provided herein. In some embodiments, a target window is a methylation window.

[0738] In some embodiments, the disclosure provides methods for editing a nucleotide. In some embodiments, the disclosure provides a method for editing a nucleobase pair of a double-stranded DNA sequence. In some embodiments, the method comprises a) contacting a target region of the double-stranded DNA sequence with a complex comprising a base editor and a guide nucleic acid (e.g., gRNA), where the target region comprises a target nucleobase pair, b) inducing strand separation of said target region, c) converting a first nucleobase of said target nucleobase pair in a single strand of the target region to a second nucleobase, d) cutting no more than one strand of said target region, wherein a third nucleobase complementary to the first nucleobase base is replaced by a fourth nucleobase complementary to the second nucleobase, and the second nucleobase is replaced with a fifth nucleobase that is complementary to the fourth nucleobase, thereby generating an intended edited base pair, wherein the efficiency of generating the intended edited base pair is at least 5%. It should be appreciated that in some embodiments, step b is omitted. In some embodiments, at least 5% of the intended base pairs are edited. In some embodiments, at least 10%, 15%, 20%, 25%, 30%, 35%, 40%, 45%, or 50% of the intended base pairs are edited. In some embodiments base editing by a method described herein may have a base conversion efficiency of at least 10% at any particular gene site. In some embodiments, base editing by a method described herein may have a base conversion efficiency of at least 20%, at least 25%, at least 30%, at least 35%, at least 40%, at least 45%, at least 50% at least 55% or at least 60%, at least 65%, at least 70%, at least 75%, at least 80%, at least 85%, at least 90%, or at least 95%, 96%, 97%, 98% or at least 99% at any particular gene site. In some embodiments base editing by a method described herein may have a base conversion efficiency of at least 70% at any particular gene site. In some embodiments base editing by a method described herein may have a base conversion efficiency of at least 80% at any particular gene site. In some embodiments base editing by a method described herein may have a base conversion efficiency of at least 90% at any particular gene site.

[0739] In some embodiments, the method causes less than 19%, 18%, 16%, 14%, 12%, 10%, 8%, 6%, 4%, 2%, 0.5%, 0.2%, or less than 0.1% indel formation. In some embodiments, the ratio of intended product to unintended products at the target nucleotide is at least 2:1, 5:1, 10:1, 20:1, 30:1, 40:1, 50:1, 60:1, 70:1, 80:1, 90:1, 100:1, or 200:1, or more. In some embodiments, the ratio of intended mutation to indel formation is greater than 1:1, 10:1, 50:1, 100:1, 500:1, or 1000:1, or more. In some embodiments, the cut single strand is hybridized to the guide nucleic acid. In some embodiments, the cut single strand is opposite to the strand comprising the first nucleobase. In some embodiments, the nucleobase editor comprises nickase activity. In some embodiments, the intended edited base pair is upstream of a PAM site. In some embodiments, the intended edited base pair is 1, 2, 3, 4, 5, 6, 7, 8, 9, 10, 11, 12, 13, 14, 15, 16, 17, 18, 19, or 20 nucleotides upstream of the PAM site. In some embodiments, the intended edited base pair is downstream of a PAM site. In some embodiments, the intended edited base pair is 1, 2, 3, 4, 5, 6, 7, 8, 9, 10, 11, 12, 13, 14, 15, 16, 17, 18, 19, or 20 nucleotides downstream stream of the PAM site. In some embodiments, the method does not require a canonical (e.g., NGG) PAM site. In some embodiments, the nucleobase editor comprises a linker. In some embodiments, the linker is 1-25 amino acids in length. In some embodiments, the linker is 5-20 amino acids in length. In some embodiments, the linker is 10, 11, 12, 13, 14, 15, 16, 17, 18, 19, or 20 amino acids in length. e.g., In some embodiments, the target region comprises a target window, wherein the target window comprises the target nucleobase pair. In some embodiments, the target window comprises 1-10 nucleotides. In some embodiments, the target window is 1-9, 1-8, 1-7, 1-6, 1-5, 1-4, 1-3, 1-2, or 1 nucleotides in length. In some embodiments, the target window is 1, 2, 3, 4, 5, 6, 7, 8, 9, 10, 11, 12, 13, 14, 15, 16, 17, 18, 19, or 20 nucleotides in length. In some embodiments, the intended edited base pair occurs within the target window. In some embodiments, the target window comprises the intended edited base pair. In some embodiments, the nucleobase editor is any one of the base editors provided herein.

### Nucleic Acid-Based Delivery of Cytidine or Adenosine Deaminase Nucleobase Editor

[0740] Nucleic acids encoding a cytidine or adenosine deaminase nucleobase editor according to the present disclosure can be administered to subjects or delivered into cells by art-known methods or as described herein. For example, cytidine or adenosine deaminase nucleobase editors can be delivered by, e.g., vectors (e.g., viral or non-viral vectors), non-vector based methods (e.g., using naked DNA or DNA complexes), or a combination thereof.

[0741] Nucleic acids encoding cytidine or adenosine deaminase nucleobase editors can be delivered directly to cells as naked DNA or RNA, for instance by means of transfection or electroporation, or can be conjugated to molecules (e.g., N-acetylgalactosamine) promoting uptake by the target cells. Nucleic acid vectors, such as the vectors can also be used. In particular embodiments, a polynucleotide, e.g. a mRNA encoding a base editor or a functional component thereof may be co-electroporated with a combination of multiple guide RNAs as described herein.

[0742] Nucleic acid vectors can comprise one or more sequences encoding a domain of a fusion protein described herein. A vector can also comprise a sequence encoding a signal peptide (e.g., for nuclear localization, nucleolar localization, or mitochondrial localization), associated with (e.g., inserted into or fused to) a sequence coding for a protein. As one example, a nucleic acid vectors can include a Cas9 coding sequence that includes one or more nuclear localization sequences (e.g., a nuclear localization sequence from SV40), and one or more deaminases.

[0743] The nucleic acid vector can also include any suitable number of regulatory/control elements, e.g., promoters, enhancers, introns, polyadenylation signals, Kozak consensus sequences, or internal ribosome entry sites (IRES). These elements are well known in the art.

[0744] Nucleic acid vectors according to this disclosure include recombinant viral vectors. Exemplary viral vectors are set forth herein above. Other viral vectors known in the art can also be used. In addition, viral particles can be used to deliver genome editing system components in nucleic acid and/or peptide form. For example, “empty” viral particles can be assembled to contain any suitable cargo. Viral vectors and viral particles can also be engineered to incorporate targeting ligands to alter target tissue specificity.

[0745] In addition to viral vectors, non-viral vectors can be used to deliver nucleic acids encoding genome editing systems according to the present disclosure. One important category of non-viral nucleic acid vectors are nanoparticles, which can be organic or inorganic. Nanoparticles are well known in the art. Any suitable nanoparticle design can be used to deliver genome editing system components or nucleic acids encoding such components. For instance, organic (e.g. lipid and/or polymer) nanoparticles can be suitable for use as delivery vehicles in certain embodiments of this disclosure. Exemplary lipids for use in nanoparticle formulations, and/or gene transfer are shown in Table 9 (below).

TABLE 9
Lipids Used for Gene Transfer

| Lipid | Abbreviation | Feature |
|---|---|---|
| 1,2-Dioleoyl-sn-glycero-3-phosphatidylcholine | DOPC | Helper |
| 1,2-Dioleoyl-sn-glycero-3-phosphatidylethanolamine | DOPE | Helper |
| Cholesterol | | Helper |
| N-[1-(2,3-Dioleyloxy)prophyl]N,N,N-trimethylammonium | DOTMA | Cationic |
| chloride | | |
| 1,2-Dioleoyloxy-3-trimethylammonium-propane | DOTAP | Cationic |
| Dioctadecylamidoglycylspermine | DOGS | Cationic |
| N-(3-Aminopropyl)-N,N-dimethyl-2,3-bis(dodecyloxy)-1- | GAP-DLRIE | Cationic |
| propanaminium bromide | | |
| Cetyltrimethylammonium bromide | CTAB | Cationic |
| 6-Lauroxyhexyl ornithinate | LHON | Cationic |
| 1-(2,3-Dioleoyloxypropyl)-2,4,6-trimethylpyridinium | 2Oc | Cationic |
| 2,3-Dioleyloxy-N-[2(sperminecarboxamido-ethyl]-N,N- | DOSPA | Cationic |
| dimethyl-1-propanaminium trifluoroacetate | | |
| 1,2-Dioleyl-3-trimethylammonium-propane | DOPA | Cationic |
| N-(2-Hydroxyethyl)-N,N-dimethyl-2,3-bis(tetradecyloxy)-1- | MDRIE | Cationic |
| propanaminium bromide | | |
| Dimyristooxypropyl dimethyl hydroxyethyl ammonium bromide | DMRI | Cationic |
| 3β-[N-(N′,N′-Dimethylaminoethane)-carbamoyl]cholesterol | DC-Chol | Cationic |
| Bis-guanidium-tren-cholesterol | BGTC | Cationic |
| 1,3-Diodeoxy-2-(6-carboxy-spermyl)-propylamide | DOSPER | Cationic |
| Dimethyloctadecylammonium bromide | DDAB | Cationic |
| Dioctadecylamidoglicylspermidin | DSL | Cationic |
| rac-[(2,3-Dioctadecyloxypropyl)(2-hydroxyethyl)]- | CLIP-1 | Cationic |
| dimethylammonium chloride | | |
| rac-[2(2,3-Dihexadecyloxypropyl- | CLIP-6 | Cationic |
| oxymethyloxy)ethyl]trimethylammonium bromide | | |
| Ethyldimyristoylphosphatidylcholine | EDMPC | Cationic |
| 1,2-Distearyloxy-N,N-dimethyl-3-aminopropane | DSDMA | Cationic |
| 1,2-Dimyristoyl-trimethylammonium propane | DMTAP | Cationic |
| O,O′-Dimyristyl-N-lysyl aspartate | DMKE | Cationic |
| 1,2-Distearoyl-sn-glycero-3-ethylpho sphocholine | DSEPC | Cationic |
| N-Palmitoyl D-erythro-sphingosyl carbamoyl-spermine | CCS | Cationic |
| N-t-Butyl-N0-tetradecyl-3-tetradecylaminopropionamidine | diC14-amidine | Cationic |
| Octadecenolyoxy[ethyl-2-heptadecenyl-3 hydroxyethyl] | DOTIM | Cationic |
| imidazolinium chloride | | |
| N1 -Cholesteryloxycarbonyl-3,7-diazanonane-1,9-diamine | CDAN | Cationic |
| 2(3-[Bis(3-amino-propyl)-amino]propylamino)-N- | RPR209120 | Cationic |
| ditetradecylcarbamoylme-ethyl-acetamide | | |
| 1,2-dilinoleyloxy-3-dimethylaminopropane | DLinDMA | Cationic |
| 2,2-dilinoleyl-4-dimethylaminoethyl-[1,3]-dioxolane | DLin-KC2- | Cationic |
| | DMA | |
| dilinoleyl-methyl-4-dimethylaminobutyrate | DLin-MC3- | Cationic |
| | DMA | |

[0746] Table 10 lists exemplary polymers for use in gene transfer and/or nanoparticle formulations.

TABLE 10
Polymers Used for Gene Transfer

| Polymer | Abbreviation |
|---|---|
| Poly(ethylene)glycol | PEG |
| Polyethylenimine | PEI |
| Dithiobis (succinimidylpropionate) | DSP |
| Dimethyl-3,3′-dithiobispropionimidate | DTBP |
| Poly(ethylene imine)biscarbamate | PEIC |
| Poly(L-lysine) | PLL |
| Histidine modified PLL | |
| Poly(N-vinylpyrrolidone) | PVP |
| Poly(propylenimine) | PPI |
| Poly(amidoamine) | PAMAM |
| Poly(amidoethylenimine) | SS-PAEI |
| Triethylenetetramine | TETA |
| Poly(β-aminoester) | |
| Poly(4-hydroxy-L-proline ester) | PHP |
| Poly(allylamine) | |
| Poly(α-[4-aminobutyl]-L-glycolic acid) | PAGA |
| Poly(D,L-lactic-co-glycolic acid) | PLGA |
| Poly(N-ethyl-4-vinylpyridinium bromide) | |
| Poly(phosphazene)s | PPZ |
| Poly(phosphoester)s | PPE |
| Poly(phosphoramidate)s | PPA |
| Poly(N-2-hydroxypropylmethacrylamide) | pHPMA |
| Poly (2-(dimethylamino)ethyl methacrylate) | pDMAEMA |
| Poly(2-aminoethyl propylene phosphate) | PPE-EA |
| Chitosan | |
| Galactosylated chitosan | |
| N-Dodacylated chitosan | |
| Histone | |
| Collagen | |
| Dextran-spermine | D-SPM |

[0747] The following Table 11 summarizes delivery methods for a polynucleotide encoding a fusion protein described herein.

TABLE 11

| | | Delivery into | | | Type of |
|---|---|---|---|---|---|
| | | Non-Dividing | Duration of | Genome | Molecule |
| Delivery | Vector/Mode | Cells | Expression | Integration | Delivered |
| Physical | (e.g., | YES | Transient | NO | Nucleic Acids |
| | electroporation, | | | | and Proteins |
| | particle gun, | | | | |
| | Calcium | | | | |
| | Phosphate | | | | |
| | transfection | | | | |
| Viral | Retrovirus | NO | Stable | YES | RNA |
| | Lentivirus | YES | Stable | YES/NO with | RNA |
| | | | | modification | |
| | Adenovirus | YES | Transient | NO | DNA |
| | Adeno- | YES | Stable | NO | DNA |
| | Associated | | | | |
| | Virus (AAV) | | | | |
| | Vaccinia Virus | YES | Very | NO | DNA |
| | | | Transient | | |
| | Herpes Simplex | YES | Stable | NO | DNA |
| | Virus | | | | |
| Non-Viral | Cationic | YES | Transient | Depends on | Nucleic Acids |
| | Liposomes | | | what is | and Proteins |
| | | | | delivered | |
| | Polymeric | YES | Transient | Depends on | Nucleic Acids |
| | Nanoparticles | | | what is | and Proteins |
| | | | | delivered | |
| Biological | Attenuated | YES | Transient | NO | Nucleic Acids |
| Non-Viral | Bacteria | | | | |
| Delivery | Engineered | YES | Transient | NO | Nucleic Acids |
| Vehicles | Bacteriophages | | | | |
| | Mammalian | YES | Transient | NO | Nucleic Acids |
| | Virus-like | | | | |
| | Particles | | | | |
| | Biological | YES | Transient | NO | Nucleic Acids |
| | liposomes: | | | | |
| | Erythrocyte | | | | |
| | Ghosts and | | | | |
| | Exosomes | | | | |

[0748] In particular embodiments, a fusion protein of the invention is encoded by a polynucleotide present in a viral vector (e.g., adeno-associated virus (AAV), AAV3, AAV3b, AAV4, AAV5, AAV6, AAV7, AAV8, AAV9, AAVrh8, AAV10, and variants thereof), or a suitable capsid protein of any viral vector. Thus, in some aspects, the disclosure relates to the viral delivery of a fusion protein. Examples of viral vectors include retroviral vectors (e.g. Maloney murine leukemia virus, MML-V), adenoviral vectors (e.g. AD100), lentiviral vectors (HIV and FIV-based vectors), herpesvirus vectors (e.g. HSV-2).

[0749] In one embodiment, inteins are utilized to join fragments or portions of a cytidine or adenosine deaminase base editor protein that is grafted onto an AAV capsid protein. As used herein, “intein” refers to a self-splicing protein intron (e.g., peptide) that ligates flanking N-terminal and C-terminal exteins (e.g., fragments to be joined). The use of certain inteins for joining heterologous protein fragments is described, for example, in Wood et al., J. Biol. Chem. 289(21); 14512-9 (2014). For example, when fused to separate protein fragments, the inteins IntN and IntC recognize each other, splice themselves out and simultaneously ligate the flanking N- and C-terminal exteins of the protein fragments to which they were fused, thereby reconstituting a full-length protein from the two protein fragments. Other suitable inteins will be apparent to a person of skill in the art.

[0750] A fragment of a fusion protein of the invention can vary in length. In some embodiments, a protein fragment ranges from 2 amino acids to about 1000 amino acids in length. In some embodiments, a protein fragment ranges from about 5 amino acids to about 500 amino acids in length. In some embodiments, a protein fragment ranges from about 20 amino acids to about 200 amino acids in length. In some embodiments, a protein fragment ranges from about 10 amino acids to about 100 amino acids in length. Suitable protein fragments of other lengths will be apparent to a person of skill in the art.

[0751] In some embodiments, a portion or fragment of a nuclease (e.g., a fragment of a deaminase, such as cytidine or adenosine deaminase, or a fragment of Cas9) is fused to an intein. The nuclease can be fused to the N-terminus or the C-terminus of the intein. In some embodiments, a portion or fragment of a fusion protein is fused to an intein and fused to an AAV capsid protein. The intein, nuclease and capsid protein can be fused together in any arrangement (e.g., nuclease-intein-capsid, intein-nuclease-capsid, capsid-intein-nuclease, etc.). In some embodiments, the N-terminus of an intein is fused to the C-terminus of a fusion protein and the C-terminus of the intein is fused to the N-terminus of an AAV capsid protein.

[0752] In some aspects, the methods described herein for editing specific genes in an immune cell can be used to genetically modify a CAR-T cell. Such CAR-T cells, and methods to produce such CAR-T cells are described in International Application Nos. PCT/US2016/060736, PCT/US2016/060734, PCT/US2016/034873, PCT/US2015/040660, PCT/EP2016/055332, PCT/IB2015/058650, PCT/EP2015/067441, PCT/EP2014/078876, PCT/EP2014/059662, PCT/IB2014/061409, PCT/US2016/019192, PCT/US2015/059106, PCT/US2016/052260, PCT/US2015/020606, PCT/US2015/055764, PCT/CN2014/094393, PCT/US2017/059989, PCT/US2017/027606, and PCT/US2015/064269, the contents of each is hereby incorporated in its entirety.

### Pharmaceutical Compositions

[0753] In some aspects, the present invention provides a pharmaceutical composition comprising a genetically modified immune cell of the present invention. More specifically, provided herein are pharmaceutical compositions comprising a genetically modified immune cell, or a population of such immune cells, expressing a chimeric antigen receptor, wherein said modified immune cell, or a population thereof, has at least one edited gene edited to enhance the function of the modified immune cell or to reduce immunosuppression or inhibition of the modified immune cell, wherein expression of the edited gene is either knocked out or knocked down. In some embodiments the at least one edited gene is TRAC, B2M, PDCD1, CBLB, TGFBR2, ZAP70, NFATc1, TET2, or combination thereof.

[0754] The pharmaceutical compositions of the present invention can be prepared in accordance with known techniques. See, e.g., Remington, The Science And Practice of Pharmacy (21st ed. 2005). In general, the immune cell, or population thereof is admixed with a suitable carrier prior to administration or storage, and in some embodiments, the pharmaceutical composition further comprises a pharmaceutically acceptable carrier. Suitable pharmaceutically acceptable carriers generally comprise inert substances that aid in administering the pharmaceutical composition to a subject, aid in processing the pharmaceutical compositions into deliverable preparations, or aid in storing the pharmaceutical composition prior to administration. Pharmaceutically acceptable carriers can include agents that can stabilize, optimize or otherwise alter the form, consistency, viscosity, pH, pharmacokinetics, solubility of the formulation. Such agents include buffering agents, wetting agents, emulsifying agents, diluents, encapsulating agents, and skin penetration enhancers. For example, carriers can include, but are not limited to, saline, buffered saline, dextrose, arginine, sucrose, water, glycerol, ethanol, sorbitol, dextran, sodium carboxymethyl cellulose, and combinations thereof.

[0755] In addition to the modified immune cell, or population thereof, and the carrier, the pharmaceutical compositions of the present invention can include at least one additional therapeutic agent useful in the treatment of disease. For example, some embodiments of the pharmaceutical composition described herein further comprise a chemotherapeutic agent. In some embodiments, the pharmaceutical composition further comprises a cytokine peptide or a nucleic acid sequence encoding a cytokine peptide. In some embodiments, the pharmaceutical compositions comprising the modified immune cell or population thereof can be administered separately from an additional therapeutic agent.

[0756] The pharmaceutical compositions of the present invention can be used to treat any disease or condition that is responsive to autologous or allogeneic immune cell immunotherapy. For example, the pharmaceutical compositions, in some embodiments are useful in the treatment of neoplasia. In some embodiments, the neoplasia is a hematological cancer. In some embodiments, the hematological cancer is a B cell cancer, and in some embodiments, the B cell cancer is multiple myeloma. In some embodiments, the B cell cancer is relapsed of relapsed/refractory multiple myeloma.

[0757] One consideration concerning the therapeutic use of genetically modified immune cells of the invention is the quantity of cells necessary to achieve an optimal or satisfactory effect. The quantity of cells to be administered may vary for the subject being treated. In one embodiment, between 10⁴ to 10¹⁰, between 10⁵ to 10⁹, or between 10⁶ and 10⁸ genetically modified immunoresponsive cells of the invention are administered to a human subject. In some embodiments, at least about 1×10⁸, 2×10⁸, 3×10⁸, 4×10⁸, and 5×10⁸ genetically modified immune cells of the invention are administered to a human subject. Determining the precise effective dose may be based on factors for each individual subject, including their size, age, sex, weight, and condition. Dosages can be readily ascertained by those skilled in the art from this disclosure and the knowledge in the art.

[0758] The skilled artisan can readily determine the number of cells and amount of optional additives, vehicles, and/or carriers in compositions and to be administered in methods of the invention. Typically, additives (in addition to the active immune cell(s)) are present in an amount of 0.001 to 50% (weight) solution in phosphate buffered saline, and the active ingredient is present in the order of micrograms to milligrams, such as about 0.0001 to about 5 wt %, preferably about 0.0001 to about 1 wt %, still more preferably about 0.0001 to about 0.05 wt % or about 0.001 to about 20 wt %, preferably about 0.01 to about 10 wt %, and still more preferably about 0.05 to about 5 wt %. Of course, for any composition to be administered to an animal or human, and for any particular method of administration, it is preferred to determine therefore: toxicity, such as by determining the lethal dose (LD) and LD50 in a suitable animal model (e.g., a rodent such as a mouse); and, the dosage of the composition(s), concentration of components therein, and the timing of administering the composition(s), which elicit a suitable response. Such determinations do not require undue experimentation from the knowledge of the skilled artisan, this disclosure and the documents cited herein. And, the time for sequential administrations can be ascertained without undue experimentation.

[0759] In one embodiment, the method and compositions described herein may be used in generating engineered T cells that express a CAR and may have one or more base edited modifications, such that the engineered T cell can mount a specific immune response against the target. The CAR may be specifically directed towards an antigen target, the antigen may be presented by a cell in a host. In some embodiments, the immune response encompasses cytotoxicity. In some embodiments, the engineered T cell has enhanced cytotoxic response against its target. In some embodiments, the engineered T cell induces an enhanced cytotoxic response against its target as compared to a non-engineered T cell. In some embodiments, the engineered T cell exhibits an enhanced cytotoxic response by at least 1.1-fold, 1.5-fold, 2-fold, 3-fold, 4-fold, 5-fold, 6-fold, 7-fold, 8-fold, 9-fold, 10-fold, 11-fold, 12-fold, 13-fold, 14-fold, 15-fold, 16-fold, 17-fold, 18-fold, 19-fold, 20-fold or more compared to a non-engineered cell. In some embodiments, the engineered T cell can kill at least 10%, at least 20%, at least 30%, at least 40%, at least 50%, at least 60%, at least 70%, at least 80%, at least 90%, at least 100%, at least 200%, at least 500% or at least 1000% more target cells than a non-engineered cell. In some embodiments, the T cell can induce higher memory response. In some embodiments, the T cell can induce lower levels of inflammatory cytokines than a non-engineered cell, that is, the engineered cell does not cause a cytokine storm response. In some embodiments, the engineered T cell is administered to an allogenic host, wherein the engineered T cell has no rejection by the host. In some embodiments, the allogenic T cell induces negligible or minimum rejection by the host.

### Methods of Treatment

[0760] Some aspects of the present invention provide methods of treating a subject in need, the method comprising administering to a subject in need an effective therapeutic amount of a pharmaceutical composition as described herein. More specifically, the methods of treatment comprise administering to a subject in need thereof a pharmaceutical composition comprising a population of modified immune cells expressing a chimeric receptor and having at least one edited gene, wherein the at least one edited gene enhances the function or reduces the immunosuppression or inhibition of the modified immune cell, and wherein expression of the at least one edited gene is either knocked out or knocked down. In some embodiments, the method of treatment is an autologous immune cell therapy. In other embodiments, the method of treatment is an allogeneic immune cell therapy.

[0761] In certain embodiments, the specificity of an immune cell is redirected to a marker expressed on the surface of a diseased or altered cell in a subject by genetically modifying the immune cell to express a chimeric antigen receptor contemplated herein. In some embodiments, the method of treatment comprises administering to a subject an immune cell as described herein, wherein the immune cell has been genetically modified to redirect its specificity to a marker expressed on a neoplastic cell. In some embodiments, the neoplasia is a B cell cancer; for example, a B cell cancer such as a lymphoma, leukemia, or a myeloma, for example, multiple myeloma. Thus, some embodiments of the present disclosure provide a method of treating a neoplasia in a subject. In some embodiments, the neoplasia being treated is a B cell cancer. In some embodiments, the B cell cancer is a lymphoma, leukemia, or multiple myeloma.

[0762] Some embodiments of the methods of treating a neoplasia in a subject comprise administering to the subject an immune cell as described herein and one or more additional therapeutic agents. For example, the immune cell of the present invention can be co-administered with a cytokine. In some embodiments, the cytokine is IL-2, IFN-á, IFN-ã, or a combination thereof. In some embodiments, the immune cell is co-administered with a chemotherapeutic agent. The chemotherapeutic can be cyclophosphamide, doxorubicin, vincristine, prednisone, or rituximab, or a combination thereof. Other chemotherapeutics include obinutuzumab, bendamustine, chlorambucil, cyclophosphamide, ibrutinib, methotrexate, cytarabine, dexamethasone, cisplatin, bortezomib, fludarabine, idelalisib, acalabrutinib, lenalidomide, venetoclax, cyclophosphamide, ifosfamide, etoposide, pentostatin, melphalan, carfilzomib, ixazomib, panobinostat, daratumumab, elotuzumab, thalidomide, lenalidomide, or pomalidomide, or a combination thereof. “Co-administered” refers to administering two or more therapeutic agents or pharmaceutical compositions during a course of treatment. Such co-administration can be simultaneous administration or sequential administration. Sequential administration of a later-administered therapeutic agent or pharmaceutical composition can occur at any time during the course of treatment after administration of the first pharmaceutical composition or therapeutic agent.

[0763] In some embodiments of the present invention, an administered immune cell proliferates in vivo and can persist in the subject for an extended period of time. Immune cells of the present invention, in some embodiments can mature into memory immune cells and remain in circulation within the subject, thereby generating a population of cells able to actively respond to recurrence of a diseased or altered cell expressing the marker recognized by the chimeric antigen receptor.

[0764] Administration of the pharmaceutical compositions contemplated herein may be carried out using conventional techniques including, but not limited to, infusion, transfusion, or parenterally. In some embodiments, parenteral administration includes infusing or injecting intravascularly, intravenously, intramuscularly, intraarterially, intrathecally, intratumorally, intradermally, intraperitoneally, transtracheally, subcutaneously, subcuticularly, intraarticularly, subcapsularly, subarachnoidly and intrasternally.

[0765] Kits, Vectors, Cells

[0766] The invention also provides kits comprising a nucleic acid construct comprising a nucleotide sequence encoding a cytidine or adenosine deaminase nucleobase editor at least two guide RNAs, each guide RNA having a nucleic acid sequence at least 85% complementary to a nucleic acid sequence of gene encoding TRAC, B2M, PD1, CBLB, and/or CTLA4. In some embodiments, the nucleotide sequence encoding the cytidine or adenosine deaminase comprises a heterologous promoter that drives expression of the cytidine or adenosine deaminase nucleobase editor.

[0767] Some aspects of this disclosure provide kits comprising a nucleic acid construct, comprising (a) a nucleotide sequence encoding (a) a Cas9 domain fused to a cytidine or adenosine deaminase as provided herein; and (b) a heterologous promoter that drives expression of the sequence of (a).

[0768] Some aspects of this disclosure provide kits for the treatment of a neoplasia comprising a modified immune cell or immune cell having reduced immunogenicity and enhanced anti-neoplasia activity, the immune or immune cell comprising a mutation in a TRAC, B2M, PD1, CBLB, and/or CTLA4 polypeptide, or a combination thereof. In some embodiments, the modified immune cell further comprises a chimeric antigen receptor having an affinity for a marker associated with the neoplasia. The neoplasia treatment kits comprise written instructions for using the modified immune cells in the treatment of the neoplasia.

[0769] The practice of the present invention employs, unless otherwise indicated, conventional techniques of molecular biology (including recombinant techniques), microbiology, cell biology, biochemistry and immunology, which are well within the purview of the skilled artisan. Such techniques are explained fully in the literature, such as, “Molecular Cloning: A Laboratory Manual”, second edition (Sambrook, 1989); “Oligonucleotide Synthesis” (Gait, 1984); “Animal Cell Culture” (Freshney, 1987); “Methods in Enzymology” “Handbook of Experimental Immunology” (Weir, 1996); “Gene Transfer Vectors for Mammalian Cells” (Miller and Calos, 1987); “Current Protocols in Molecular Biology” (Ausubel, 1987); “PCR: The Polymerase Chain Reaction”, (Mullis, 1994); “Current Protocols in Immunology” (Coligan, 1991). These techniques are applicable to the production of the polynucleotides and polypeptides of the invention, and, as such, may be considered in making and practicing the invention. Particularly useful techniques for particular embodiments will be discussed in the sections that follow.

[0770] The following examples are put forth so as to provide those of ordinary skill in the art with a complete disclosure and description of how to make and use the assay, screening, and therapeutic methods of the invention, and are not intended to limit the scope of what the inventors regard as their invention.

### EXAMPLES

### Example 1: Disruption of Splice Sites and Introduction of Stop Codons in Genes Expressed in Immune Cells

[0771] A nucleobase editor, BE4, was used to disrupt splice sites and insert stop codons into a subset of genes expressed in immune cells. A plasmid construct, pCMV_BE4max, encodes BE4, which comprises an APOBEC-1 cytidine deaminase domain having cytidine deaminase activity, a Cas9 domain comprising a D10A mutation and having nicknase activity, and two uracil DNA glycosylase inhibitor (UGI) domains. UGI is an 83-amino acid residue protein derived from Bacillus subtilis bacteriophage PBS1 that potently blocks to edit the splice sites of certain genes expressed in immune cells. BE4 further comprises N-terminal and C-terminal nuclear localization signals (NLSs).

>pCMV_BE4max
ATATGCCAAGTACGCCCCCTATTGACGTCAATGACGGTAAATGGCCCGCCTGGCATTAT
GCCCAGTACATGACCTTATGGGACTTTCCTACTTGGCAGTACATCTACGTATTAGTCAT
CGCTATTACCATGGTGATGCGGTTTTGGCAGTACATCAATGGGCGTGGATAGCGGTTTG
ACTCACGGGGATTTCCAAGTCTCCACCCCATTGACGTCAATGGGAGTTTGTTTTGGCAC
CAAAATCAACGGGACTTTCCAAAATGTCGTAACAACTCCGCCCCATTGACGCAAATGGG
CGGTAGGCGTGTACGGTGGGAGGTCTATATAAGCAGAGCTGGTTTAGTGAACCGTCAGA
TCCGCTAGAGATCCGCGGCCGCTAATACGACTCACTATAGGGAGAGCCGCCACCATGAA
ACGGACAGCCGACGGAAGCGAGTTCGAGTCACCAAAGAAGAAGCGGAAAGTCTCCTCAG
AGACTGGGCCTGTCGCCGTCGATCCAACCCTGCGCCGCCGGATTGAACCTCACGAGTTT
GAAGTGTTCTTTGACCCCCGGGAGCTGAGAAAGGAGACATGCCTGCTGTACGAGATCAA
CTGGGGAGGCAGGCACTCCATCTGGAGGCACACCTCTCAGAACACAAATAAGCACGTGG
AGGTGAACTTCATCGAGAAGTTTACCACAGAGCGGTACTTCTGCCCCAATACCAGATGT
AGCATCACATGGTTTCTGAGCTGGTCCCCTTGCGGAGAGTGTAGCAGGGCCATCACCGA
GTTCCTGTCCAGATATCCACACGTGACACTGTTTATCTACATCGCCAGGCTGTATCACC
ACGCAGACCCAAGGAATAGGCAGGGCCTGCGCGATCTGATCAGCTCCGGCGTGACCATC
CAGATCATGACAGAGCAGGAGTCCGGCTACTGCTGGCGGAACTTCGTGAATTATTCTCC
TAGCAACGAGGCCCACTGGCCTAGGTACCCACACCTGTGGGTGCGCCTGTACGTGCTGG
AGCTGTATTGCATCATCCTGGGCCTGCCCCCTTGTCTGAATATCCTGCGGAGAAAGCAG
CCCCAGCTGACCTTCTTTACAATCGCCCTGCAGTCTTGTCACTATCAGAGGCTGCCACC
CCACATCCTGTGGGCCACAGGCCTGAAGTCTGGAGGATCTAGCGGAGGATCCTCTGGCA
GCGAGACACCAGGAACAAGCGAGTCAGCAACACCAGAGAGCAGTGGCGGCAGCAGCGGC
GGCAGCGACAAGAAGTACAGCATCGGCCTGGCCATCGGCACCAACTCTGTGGGCTGGGC
CGTGATCACCGACGAGTACAAGGTGCCCAGCAAGAAATTCAAGGTGCTGGGCAACACCG
ACCGGCACAGCATCAAGAAGAACCTGATCGGAGCCCTGCTGTTCGACAGCGGCGAAACA
GCCGAGGCCACCCGGCTGAAGAGAACCGCCAGAAGAAGATACACCAGACGGAAGAACCG
GATCTGCTATCTGCAAGAGATCTTCAGCAACGAGATGGCCAAGGTGGACGACAGCTTCT
TCCACAGACTGGAAGAGTCCTTCCTGGTGGAAGAGGATAAGAAGCACGAGCGGCACCCC
ATCTTCGGCAACATCGTGGACGAGGTGGCCTACCACGAGAAGTACCCCACCATCTACCA
CCTGAGAAAGAAACTGGTGGACAGCACCGACAAGGCCGACCTGCGGCTGATCTATCTGG
CCCTGGCCCACATGATCAAGTTCCGGGGCCACTTCCTGATCGAGGGCGACCTGAACCCC
GACAACAGCGACGTGGACAAGCTGTTCATCCAGCTGGTGCAGACCTACAACCAGCTGTT
CGAGGAAAACCCCATCAACGCCAGCGGCGTGGACGCCAAGGCCATCCTGTCTGCCAGAC
TGAGCAAGAGCAGACGGCTGGAAAATCTGATCGCCCAGCTGCCCGGCGAGAAGAAGAAT
GGCCTGTTCGGAAACCTGATTGCCCTGAGCCTGGGCCTGACCCCCAACTTCAAGAGCAA
CTTCGACCTGGCCGAGGATGCCAAACTGCAGCTGAGCAAGGACACCTACGACGACGACC
TGGACAACCTGCTGGCCCAGATCGGCGACCAGTACGCCGACCTGTTTCTGGCCGCCAAG
AACCTGTCCGACGCCATCCTGCTGAGCGACATCCTGAGAGTGAACACCGAGATCACCAA
GGCCCCCCTGAGCGCCTCTATGATCAAGAGATACGACGAGCACCACCAGGACCTGACCC
TGCTGAAAGCTCTCGTGCGGCAGCAGCTGCCTGAGAAGTACAAAGAGATTTTCTTCGAC
CAGAGCAAGAACGGCTACGCCGGCTACATTGACGGCGGAGCCAGCCAGGAAGAGTTCTA
CAAGTTCATCAAGCCCATCCTGGAAAAGATGGACGGCACCGAGGAACTGCTCGTGAAGC
TGAACAGAGAGGACCTGCTGCGGAAGCAGCGGACCTTCGACAACGGCAGCATCCCCCAC
CAGATCCACCTGGGAGAGCTGCACGCCATTCTGCGGCGGCAGGAAGATTTTTACCCATT
CCTGAAGGACAACCGGGAAAAGATCGAGAAGATCCTGACCTTCCGCATCCCCTACTACG
TGGGCCCTCTGGCCAGGGGAAACAGCAGATTCGCCTGGATGACCAGAAAGAGCGAGGAA
ACCATCACCCCCTGGAACTTCGAGGAAGTGGTGGACAAGGGCGCTTCCGCCCAGAGCTT
CATCGAGCGGATGACCAACTTCGATAAGAACCTGCCCAACGAGAAGGTGCTGCCCAAGC
ACAGCCTGCTGTACGAGTACTTCACCGTGTATAACGAGCTGACCAAAGTGAAATACGTG
ACCGAGGGAATGAGAAAGCCCGCCTTCCTGAGCGGCGAGCAGAAAAAGGCCATCGTGGA
CCTGCTGTTCAAGACCAACCGGAAAGTGACCGTGAAGCAGCTGAAAGAGGACTACTTCA
AGAAAATCGAGTGCTTCGACTCCGTGGAAATCTCCGGCGTGGAAGATCGGTTCAACGCC
TCCCTGGGCACATACCACGATCTGCTGAAAATTATCAAGGACAAGGACTTCCTGGACAA
TGAGGAAAACGAGGACATTCTGGAAGATATCGTGCTGACCCTGACACTGTTTGAGGACA
GAGAGATGATCGAGGAACGGCTGAAAACCTATGCCCACCTGTTCGACGACAAAGTGATG
AAGCAGCTGAAGCGGCGGAGATACACCGGCTGGGGCAGGCTGAGCCGGAAGCTGATCAA
CGGCATCCGGGACAAGCAGTCCGGCAAGACAATCCTGGATTTCCTGAAGTCCGACGGCT
TCGCCAACAGAAACTTCATGCAGCTGATCCACGACGACAGCCTGACCTTTAAAGAGGAC
ATCCAGAAAGCCCAGGTGTCCGGCCAGGGCGATAGCCTGCACGAGCACATTGCCAATCT
GGCCGGCAGCCCCGCCATTAAGAAGGGCATCCTGCAGACAGTGAAGGTGGTGGACGAGC
TCGTGAAAGTGATGGGCCGGCACAAGCCCGAGAACATCGTGATCGAAATGGCCAGAGAG
AACCAGACCACCCAGAAGGGACAGAAGAACAGCCGCGAGAGAATGAAGCGGATCGAAGA
GGGCATCAAAGAGCTGGGCAGCCAGATCCTGAAAGAACACCCCGTGGAAAACACCCAGC
TGCAGAACGAGAAGCTGTACCTGTACTACCTGCAGAATGGGCGGGATATGTACGTGGAC
CAGGAACTGGACATCAACCGGCTGTCCGACTACGATGTGGACCATATCGTGCCTCAGAG
CTTTCTGAAGGACGACTCCATCGACAACAAGGTGCTGACCAGAAGCGACAAGAACCGGG
GCAAGAGCGACAACGTGCCCTCCGAAGAGGTCGTGAAGAAGATGAAGAACTACTGGCGG
CAGCTGCTGAACGCCAAGCTGATTACCCAGAGAAAGTTCGACAATCTGACCAAGGCCGA
GAGAGGCGGCCTGAGCGAACTGGATAAGGCCGGCTTCATCAAGAGACAGCTGGTGGAAA
CCCGGCAGATCACAAAGCACGTGGCACAGATCCTGGACTCCCGGATGAACACTAAGTAC
GACGAGAATGACAAGCTGATCCGGGAAGTGAAAGTGATCACCCTGAAGTCCAAGCTGGT
GTCCGATTTCCGGAAGGATTTCCAGTTTTACAAAGTGCGCGAGATCAACAACTACCACC
ACGCCCACGACGCCTACCTGAACGCCGTCGTGGGAACCGCCCTGATCAAAAAGTACCCT
AAGCTGGAAAGCGAGTTCGTGTACGGCGACTACAAGGTGTACGACGTGCGGAAGATGAT
CGCCAAGAGCGAGCAGGAAATCGGCAAGGCTACCGCCAAGTACTTCTTCTACAGCAACA
TCATGAACTTTTTCAAGACCGAGATTACCCTGGCCAACGGCGAGATCCGGAAGCGGCCT
CTGATCGAGACAAACGGCGAAACCGGGGAGATCGTGTGGGATAAGGGCCGGGATTTTGC
CACCGTGCGGAAAGTGCTGAGCATGCCCCAAGTGAATATCGTGAAAAAGACCGAGGTGC
AGACAGGCGGCTTCAGCAAAGAGTCTATCCTGCCCAAGAGGAACAGCGATAAGCTGATC
GCCAGAAAGAAGGACTGGGACCCTAAGAAGTACGGCGGCTTCGACAGCCCCACCGTGGC
CTATTCTGTGCTGGTGGTGGCCAAAGTGGAAAAGGGCAAGTCCAAGAAACTGAAGAGTG
TGAAAGAGCTGCTGGGGATCACCATCATGGAAAGAAGCAGCTTCGAGAAGAATCCCATC
GACTTTCTGGAAGCCAAGGGCTACAAAGAAGTGAAAAAGGACCTGATCATCAAGCTGCC
TAAGTACTCCCTGTTCGAGCTGGAAAACGGCCGGAAGAGAATGCTGGCCTCTGCCGGCG
AACTGCAGAAGGGAAACGAACTGGCCCTGCCCTCCAAATATGTGAACTTCCTGTACCTG
GCCAGCCACTATGAGAAGCTGAAGGGCTCCCCCGAGGATAATGAGCAGAAACAGCTGTT
TGTGGAACAGCACAAGCACTACCTGGACGAGATCATCGAGCAGATCAGCGAGTTCTCCA
AGAGAGTGATCCTGGCCGACGCTAATCTGGACAAAGTGCTGTCCGCCTACAACAAGCAC
CGGGATAAGCCCATCAGAGAGCAGGCCGAGAATATCATCCACCTGTTTACCCTGACCAA
TCTGGGAGCCCCTGCCGCCTTCAAGTACTTTGACACCACCATCGACCGGAAGAGGTACA
CCAGCACCAAAGAGGTGCTGGACGCCACCCTGATCCACCAGAGCATCACCGGCCTGTAC
GAGACACGGATCGACCTGTCTCAGCTGGGAGGTGACAGCGGCGGGAGCGGCGGGAGCGG
GGGGAGCACTAATCTGAGCGACATCATTGAGAAGGAGACTGGGAAACAGCTGGTCATTC
AGGAGTCCATCCTGATGCTGCCTGAGGAGGTGGAGGAAGTGATCGGCAACAAGCCAGAG
TCTGACATCCTGGTGCACACCGCCTACGACGAGTCCACAGATGAGAATGTGATGCTGCT
GACCTCTGACGCCCCCGAGTATAAGCCTTGGGCCCTGGTCATCCAGGATTCTAACGGCG
AGAATAAGATCAAGATGCTGAGCGGAGGATCCGGAGGATCTGGAGGCAGCACCAACCTG
TCTGACATCATCGAGAAGGAGACAGGCAAGCAGCTGGTCATCCAGGAGAGCATCCTGAT
GCTGCCCGAAGAAGTCGAAGAAGTGATCGGAAACAAGCCTGAGAGCGATATCCTGGTCC
ATACCGCCTACGACGAGAGTACCGACGAAAATGTGATGCTGCTGACATCCGACGCCCCA
GAGTATAAGCCCTGGGCTCTGGTCATCCAGGATTCCAACGGAGAGAACAAAATCAAAAT
GCTGTCTGGCGGCTCAAAAAGAACCGCCGACGGCAGCGAATTCGAGCCCAAGAAGAAGA
GGAAAGTCTAACCGGTCATCATCACCATCACCATTGAGTTTAAACCCGCTGATCAGCCT
CGACTGTGCCTTCTAGTTGCCAGCCATCTGTTGTTTGCCCCTCCCCCGTGCCTTCCTTG
ACCCTGGAAGGTGCCACTCCCACTGTCCTTTCCTAATAAAATGAGGAAATTGCATCGCA
TTGTCTGAGTAGGTGTCATTCTATTCTGGGGGGTGGGGTGGGGCAGGACAGCAAGGGGG
AGGATTGGGAAGACAATAGCAGGCATGCTGGGGATGCGGTGGGCTCTATGGCTTCTGAG
GCGGAAAGAACCAGCTGGGGCTCGATACCGTCGACCTCTAGCTAGAGCTTGGCGTAATC
ATGGTCATAGCTGTTTCCTGTGTGAAATTGTTATCCGCTCACAATTCCACACAACATAC
GAGCCGGAAGCATAAAGTGTAAAGCCTAGGGTGCCTAATGAGTGAGCTAACTCACATTA
ATTGCGTTGCGCTCACTGCCCGCTTTCCAGTCGGGAAACCTGTCGTGCCAGCTGCATTA
ATGAATCGGCCAACGCGCGGGGAGAGGCGGTTTGCGTATTGGGCGCTCTTCCGCTTCCT
CGCTCACTGACTCGCTGCGCTCGGTCGTTCGGCTGCGGCGAGCGGTATCAGCTCACTCA
AAGGCGGTAATACGGTTATCCACAGAATCAGGGGATAACGCAGGAAAGAACATGTGAGC
AAAAGGCCAGCAAAAGGCCAGGAACCGTAAAAAGGCCGCGTTGCTGGCGTTTTTCCATA
GGCTCCGCCCCCCTGACGAGCATCACAAAAATCGACGCTCAAGTCAGAGGTGGCGAAAC
CCGACAGGACTATAAAGATACCAGGCGTTTCCCCCTGGAAGCTCCCTCGTGCGCTCTCC
TGTTCCGACCCTGCCGCTTACCGGATACCTGTCCGCCTTTCTCCCTTCGGGAAGCGTGG
CGCTTTCTCATAGCTCACGCTGTAGGTATCTCAGTTCGGTGTAGGTCGTTCGCTCCAAG
CTGGGCTGTGTGCACGAACCCCCCGTTCAGCCCGACCGCTGCGCCTTATCCGGTAACTA
TCGTCTTGAGTCCAACCCGGTAAGACACGACTTATCGCCACTGGCAGCAGCCACTGGTA
ACAGGATTAGCAGAGCGAGGTATGTAGGCGGTGCTACAGAGTTCTTGAAGTGGTGGCCT
AACTACGGCTACACTAGAAGAACAGTATTTGGTATCTGCGCTCTGCTGAAGCCAGTTAC
CTTCGGAAAAAGAGTTGGTAGCTCTTGATCCGGCAAACAAACCACCGCTGGTAGCGGTG
GTTTTTTTGTTTGCAAGCAGCAGATTACGCGCAGAAAAAAAGGATCTCAAGAAGATCCT
TTGATCTTTTCTACGGGGTCTGACACTCAGTGGAACGAAAACTCACGTTAAGGGATTTT
GGTCATGAGATTATCAAAAAGGATCTTCACCTAGATCCTTTTAAATTAAAAATGAAGTT
TTAAATCAATCTAAAGTATATATGAGTAAACTTGGTCTGACAGTTACCAATGCTTAATC
AGTGAGGCACCTATCTCAGCGATCTGTCTATTTCGTTCATCCATAGTTGCCTGACTCCC
CGTCGTGTAGATAACTACGATACGGGAGGGCTTACCATCTGGCCCCAGTGCTGCAATGA
TACCGCGAGACCCACGCTCACCGGCTCCAGATTTATCAGCAATAAACCAGCCAGCCGGA
AGGGCCGAGCGCAGAAGTGGTCCTGCAACTTTATCCGCCTCCATCCAGTCTATTAATTG
TTGCCGGGAAGCTAGAGTAAGTAGTTCGCCAGTTAATAGTTTGCGCAACGTTGTTGCCA
TTGCTACAGGCATCGTGGTGTCACGCTCGTCGTTTGGTATGGCTTCATTCAGCTCCGGT
TCCCAACGATCAAGGCGAGTTACATGATCCCCCATGTTGTGCAAAAAAGCGGTTAGCTC
CTTCGGTCCTCCGATCGTTGTCAGAAGTAAGTTGGCCGCAGTGTTATCACTCATGGTTA
TGGCAGCACTGCATAATTCTCTTACTGTCATGCCATCCGTAAGATGCTTTTCTGTGACT
GGTGAGTACTCAACCAAGTCATTCTGAGAATAGTGTATGCGGCGACCGAGTTGCTCTTG
CCCGGCGTCAATACGGGATAATACCGCGCCACATAGCAGAACTTTAAAAGTGCTCATCA
TTGGAAAACGTTCTTCGGGGCGAAAACTCTCAAGGATCTTACCGCTGTTGAGATCCAGT
TCGATGTAACCCACTCGTGCACCCAACTGATCTTCAGCATCTTTTACTTTCACCAGCGT
TTCTGGGTGAGCAAAAACAGGAAGGCAAAATGCCGCAAAAAAGGGAATAAGGGCGACAC
GGAAATGTTGAATACTCATACTCTTCCTTTTTCAATATTATTGAAGCATTTATCAGGGT
TATTGTCTCATGAGCGGATACATATTTGAATGTATTTAGAAAAATAAACAAATAGGGGT
TCCGCGCACATTTCCCCGAAAAGTGCCACCTGACGTCGACGGATCGGGAGATCGATCTC
CCGATCCCCTAGGGTCGACTCTCAGTACAATCTGCTCTGATGCCGCATAGTTAAGCCAG
TATCTGCTCCCTGCTTGTGTGTTGGAGGTCGCTGAGTAGTGCGCGAGCAAAATTTAAGC
TACAACAAGGCAAGGCTTGACCGACAATTGCATGAAGAATCTGCTTAGGGTTAGGCGTT
TTGCGCTGCTTCGCGATGTACGGGCCAGATATACGCGTTGACATTGATTATTGACTAGT
TATTAATAGTAATCAATTACGGGGTCATTAGTTCATAGCCCATATATGGAGTTCCGCGT
TACATAACTTACGGTAAATGGCCCGCCTGGCTGACCGCCCAACGACCCCCGCCCATTGA
CGTCAATAATGACGTATGTTCCCATAGTAACGCCAATAGGGACTTTCCATTGACGTCAA
TGGGTGGAGTATTTACGGTAAACTGCCCACTTGGCAGTACATCAAGTGTATC

[0772] To ascertain the effectiveness of BE4 in knocking down or out protein expression 25 in immune cells, a first population of immune cells was co-transfected with mRNA encoding BE4 and an sgRNA that targeted the C base complementary to the G base of the donor or acceptor splice site of TRAC exon 1, TRAC exon 3, or B2M exon 1, depending on the specific target site. mRNA was produced by in vitro transcription, (TriLin Biotechnologies). Briefly, 4 microgm of BE4 mRNA and 2 microgm of synthetic gRNA were electroporated into 1M CD3+ T cells (Nucleofector™ Platform, Lonza Bioscience). The cells were then cultured for 3 days to allow sufficient time for base-editing. For comparison, a second population of immune cells was co-transfected with mRNA encoding a Cas9 nuclease and sgRNA that target the G base of the donor splice site of B2M exon 1. No discernible difference between BE4 editing and the Cas9 editing was observed, and the knockdown for each edited gene was greater than 90%, whereas unelectroporated control cells had no significant knockdown (FIG. 2).

[0773] It was hypothesized that the genetic modifications responsible for the observed knockdown of the targeted genes would differ if the cells were transfected with mRNA encoding BE4, which catalyzes single strand nicks, or with the the Cas9 nuclease that catalyzes double-strand breaks. To test this hypothesis, immune cells were co-transfected with either 2 microgm BE4/1 microgm sgRNA (medium) or 4 microgm BE4/2 microgm sgRNA (high) RNA encoding the BE4 base editor and sgRNA that target the G base of the donor splice site of the B2M exon 1. After incubation for 3, 5, and 7 days, DNA was collected and sequenced. Referring to FIG. 3, the majority of base edits revealed disruption of only the splice site and in the manner expected (i.e., C to T transition in the antisense strand was incorporated, resulting in a G to A transition in the sense strand). These results contrasted with those obtained from cells transfected with a Cas9 nuclease, which show that most edits in the Cas9 transfected cells were indels (FIG. 3).

[0774] Disruption of splice site and the introduction of stop codons can be effective in knocking down expression of a target gene. BE4-mediated editing of the splice acceptor in TRAC exon 3 and the splice donor in B2M exon 1 and PDCD1 exon 1 resulted in reduced expression of the full-length proteins (FIGS. 4 and 5). The BE4-mediated changes observed in the splice site were C to T transitions, although indels and C to G transversions were also observed. Insertion of an ochre stop codon into exon 2 of the PDCD1 gene, in which consecutive cytidine residues in the exon were targeted and edited to thymidine residues, also resulted in significant knock down of gene expression, albeit a lesser reduction than that seen for the TRAC and B2M genes (FIG. 4). These results further suggest that BE4-mediated single or consecutive cytidine base editing of genes expressed in immune cells results in efficient reduction of gene expression.

### Example 2: In Silico Analysis of Spice Site Disruption and Stop Codon Insertion

[0775] To determine if designed gRNA would bind to off-site targets, the nucleic acid sequences of the gRNAs were analyzed using CAS-OFFinder. Referring to FIG. 6, an “X” bulge type indicates that the gRNA aligns with the genomic DNA and any discrepancy is a mismatch. As the number of mismatches increases from one to four, the potential off-site binding increases. For example, results for the TRAC exon 3 splice acceptor show that when there are three mismatches, there are 26 offsite binding possibilities, while there are 164 with four mismatches.

[0776] If the gRNA has a bulge, wherein the gRNA has twenty base pairs, but aligns with nineteen base pairs of genomic DNA, a bulge results. Again referring to FIG. 6, when the TRAC exon 3 splice acceptor gRNA has a bulge of one base pair, the number of offsite binding possibilities increases with increasing mismatches; however, the number of possibilities is significantly lower than when there is no bulge (i.e., when the bulge size is zero).

### Example 3: Multiplex Base Editing in Immune Cells

[0777] To determine if BE4 could mediate base editing of multiple genes to generate a multi-knockdown cell, immune cells were co-transfected with mRNA encoding a BE4 base editor along with sgRNA that target specific sites in B2M, TRAC, PD1, or in combinations thereof. Referring to FIG. 7, the BE4 system elicited effective knockdown, as measured by flow cytometry, to identify the percentage of cells with decreased protein production in single, double, and triple gene edits. The cells were gated on B2M and CD3 expression, with CD3 expression serving as a proxy for TRAC expression. Because PD1 staining is inefficient, direct measurement of cells expressing this protein was not performed. No differences were observed between cell populations with single, double, and triple gene edits, and immune cells modified to knock-down expression of B2M, TRAC, and PD1 (a triple gene edit) are detectably distinct from non-modified control immune cell (FIG. 8).

[0778] The modifications to the genes responsible for the decreased protein expression are summarized in FIG. 9. Specifically, and similarly to the mechanism resulting in decreased expression in single gene modification described in Example 1, C to T transitions constitute the vast number of edits observed in the modified B2M single modified gene cell population and in the B2M+PD1, B2M+TRAC, and B2M+TRAC+PD1 multiple modified genes cell populations. Indels and transversions constitute an insignificant minority of observed genetic changes in the edited genes.

[0779] Thus, concurrent modification of three genetic loci by base editing produced highly efficient gene knockouts with no detectable translocation events as assessed by Uni-Directional Targeted Sequencing (UDiTaS; Giannoukos et al., BMC Genomics. 2018 Mar. 21; 19(1):212. doi: 10.1186/s12864-018-4561-9). Additionally, translocations were not detected in BE4-edited genes. A droplet digital polymerase chain reaction (ddPCR) strategy (FIG. 10) was employed to detect translocations between the B2M, TRAC, and PD1 BE4-edited genes. DNA extracted from cells modified with BE4 or Cas9 to generate B2M+TRAC+PD1 edits was analyzed with next generation sequencing (NGS) using a QX200 droplet digital instrument (Bio-Rad) to determine the exact sequence of the BE4 and Cas9 edits. As shown on the left panel of FIG. 11, the B2M, TRAC, and PD1 genes were modified in most cells. ddPCR analysis showed that translocations were not present in the BE4-edited cells, but were observed in approximately 1.7% of the Cas9-edited cells (FIG. 11, right panel). Table 12 further illustrates that translocations were not observed in the BE4-edited cells.

TABLE 12

| | | Control amplicon | Experimental |
|---|---|---|---|
| Base Editor | Translocation | droplets | amplicon droplets |
| Cas9 nuclease | B2M-TRAC | 61,206 | 585 |
| | B2M-PDCD1 | 55,970 | 291 |
| | PDCD1-TRAC | 59,600 | 112 |
| BE4 | B2M-TRAC | 90,717 | 0 |
| | B2M-PDCD1 | 89,028 | 0 |
| | PDCD1-TRAC | 83,501 | 0 |

### Example 4: BE4-Mediated Editing of Cbl Proto-Oncogene B (CBLB)

[0780] Cbl-b is a T cell receptor (TCR) signaling protein that negatively regulates TCR complex signaling (FIG. 12). Because T cells have a lower activation threshold when Cbl-b signaling is inhibited, knocking out or down this gene could significantly improve the effectiveness of a T cell or a T cell expressing a CAR. To determine if the Cbl-b gene was susceptible cytidine deamination mediated modification, cells were co-transfected with mRNA encoding a BE4 and sgRNA that target the splice site acceptor of exon 8 and 16, the splice site donor of exons 8, 10, 11, and 12, or that would promote the insertion of a STOP codon in exons 1, 4, and 8. Resulting cells were analyzed with flow cytometry.

[0781] Referring to FIG. 13, disruption of the splice site donor of exon 12 and the splice site acceptor of exon 8 resulted in the greatest reduction of Cbl-b expression (67.2% and 57.4%, respectively). And of the cells transfected with the exon 8 splice site acceptor and the exon 12 splice site donor sgRNAs, slightly more than 60% of the cells were edited successfully (FIG. 13, bar graph).

### Example 5: Cas12b Nuclease Characterization in Immune Cells

[0782] Cas12b/c2c1 site specifically targets and cleaves both strands of a double stranded nucleic acid molecule. Two different Cas12b/c2c1 proteins, BhCas12b and BvCas12b, were characterized by determining the propensity the enzymes for mediating indels in the target nucleic acid molecule. mRNA encoding the Cas12b/c2c1 proteins was electroporated into T cells along with guide RNAs specific for a locus in the GRIN2B gene and for a locus in the DNMT1 gene. The cells were cultured for 3-5 days, followed by isolation of cellular DNA. Indel rates were determined by Next Generation Sequencing. Referring to FIG. 14, DNA isolated from cells treated with the BhCas12b protein had a much higher percentage (approximately 75%) of indels in the GRIN2B gene than did the DNA isolated from cells treated with the BvCas12b protein (approximately 20%). Indels in the DNMT1 gene were also observed at a higher rate in the DNA isolated from cells treated with BhCas12b (approximately 20%) than observed in the DNA isolated from cells treated with BvCas12b (approximately 0%).

[0783] The BhCas12b (V4) protein was used to disrupt the TRAC gene. T cells were transduced via electroporation with the mRNA encoding the BhCas12b (V4) protein along with guide RNAs specific for loci in the GRIN2B, DNMT1, and TRAC genes. 96 hours post-electroporation, cells were assessed using fluorescence assisted cell sorting (FACS) analysis, with cells being gated for CD3 (a proxy for TRAC). Referring to FIG. 15, approximately 95% of T cells transduced with a plasmid encoding GFP or with BhCas12b (V4) and guide RNAs specific for GRIN2B or DNMT1 were CD3+. Those cells transduced to express BhCas12b (V4) and guide RNAs specific for loci in the TRAC gene were less likely to be CD3+ (approximately 2% to approximately 50%, depending on the guide RNA used). Three of the eleven TRAC guide RNAs tested led to approximately 100% BhCas12b (V4)-mediated indels.

### Example 6: CAR-P2A-mCherry Lentivirus Expression Characterization

[0784] Cells were transduced to express a chimeric antigen receptor (CAR) using the CAR-P2A-mCherry lentivirus and analyzed for CAR expression using fluorescence assisted cell sorting (FACS). Cells were unstained, incubated with a BCMA protein conjugated to R-phycoerythrin (PE) or fluorescein isothiocyanate (FITC). Because BCMA is the CAR's target antigen, cells expressing the CAR will bind dye-labeled BCMA. Referring to FIG. 16, for cells that were not stained, FACS analysis only detected the presence of mCherry in the transduced sample, with some spillover into the PE channel. The BCMA-PE channel shows a highly positive signal beyond what was seen in the spillover, and these results were confirmed in cells incubated with BCMA-FITC. The dye-labeled BCMA protein detection results suggest almost identical expression of the CAR as that seen for mCherry. Referring to FIG. 17, 85% CAR expression was detected via FACS analysis in cells transduced with a poly(1,8-octanediol citrate) (POC) lentiviral vector.

### Example 7: BE4 Produces Efficient, Durable Gene Knockout with High Product Purity

[0785] BE4 mediates base editing of multiple genes to generate a multi-knockdown cell. Immune cells were co-transfected with mRNA encoding a BE4 base editor along with sgRNA that target specific sites in B2M, TRAC, PD1, or in combinations thereof. As shown by sequencing data, base editing was efficient at modifying cells and durable up to at least 7 days (FIG. 18). High product purity was observed, as C to T transitions constituted the vast number of edits observed. Indels and C-to-G and C-to-A transversions constituted an insignificant minority of observed genetic changes in the edited genes. Base editing was also as efficient as spCas9 nuclease at generating desired modifications.

[0786] The BE4 system elicited effective knockdown as measured by flow cytometry, which identifies the percentage of cells with decreased surface expression (FIG. 19A). Cells gated on B2M expression displayed loss of B2M protein on the cell surface. As measured by flow cytometry, base editing was also as efficient as spCas9 nuclease at generating B2M protein knockout.

### Example 8: Orthogonal Translocation Detection Assay Cannot Detect BE4-Induced Rearrangements in Triple-Edited T Cells

[0787] Immune cells were co-transfected with mRNA encoding a BE4 base editor along with sgRNAs that targeted specific sites in B2M, TRAC, and PD1. The triple-edited T cells were evaluated using a translocation detection assay that was capable of detecting specific translocations that were undesirable between B2M, TRAC, and PD1 target genes (FIG. 20). Notably, none of these specific translocations were detected in any of the BE4-edited genes (Table 13). In contrast, Cas9-treated cells displayed low, but detectable levels of the translocations. Thus, multiplex editing of T cells using the BE4 base editor did not generate translocations in contrast to multiplex editing using Cas9 nuclease.

TABLE 13

| | Mock | BE4-treated | Cas9-treated |
|---|---|---|---|
| Type | (%) | (%) | (%) |
| On-target modification | 0 | 89.9/97.9/89.1 | 53.0/77.2/55.2 |
| (B2M/TRAC/PDCD1) | | | |
| B2M-A/TRAC-A | 0 | 0 | 0.925 |
| B2M-A/TRAC-B | 0 | 0 | 0.353 |
| B2M-A/PDCD1-A | 0 | 0 | 1.647 |
| B2M-A/PDCD1-B | 0 | 0 | 0.508 |
| B2M-B/TRAC-A* | 0 | 0 | 0.505 |

LLoD_{BE4} = 0.1%
*B2M-B only measurable in this experiment if translocation includes a local rearrangement at the B2M locus

### Example 9: Multiplexed Base Editing does not Significantly Impair Cell Expansion

[0788] An extensive guide screen was performed across B2M, TRAC, and PD1 targets with both BE4 and spCas9 sgRNAs. Guides were selected for high editing efficiency and expansion based on single-plex test. Final cell yields compared between 1, 2 and 3 edits using BE4 and spCas9 and were normalized to electroporation only control. BE4 edited cells with the desired edits displayed high yields when up to 3 edits were made (FIG. 21). In contrast, spCas9 edited cells showed reduced yields when increasing numbers of multiplex edits were made. Thus, multiplexed base edited cells maintained high cell expansion even when up to 3 edits were being made. Thus, BE4 generated multiplex-edited T cells with no detectable genomic rearrangements while also maintaining high cell expansion compared to spCas9 treated samples.

### Example 10: BE4 Generated Triple-Edited T Cells with Similar On-Target Editing Efficiency and Cellular Phenotype as spCas9

[0789] T cells were co-transfected with mRNA encoding a BE4 base editor along with sgRNAs that target specific sites in B2M, TRAC, and PD1. As shown by sequencing data, base editing was efficient at modifying cells at all three sites (FIG. 22). Modification of the genes by base editing was similar to that using spCas9 nuclease. Flow cytometry also showed decreased surface expression of B2M and CD3 (FIG. 23, upper panel). Compared to electroporation only control cells, BE4 and Cas9 multiplex edited cells displayed significant reductions of B2M and CD3 protein on the cell surface (>95% CD3⁻/B2M⁻). Although PD1 staining is less efficient, significant reductions (˜90%) in PD1 were observed in BE4 and Cas9 multiplex edited cells compared to electroporation only control cells (FIG. 23, lower panel).

### Example 11: BE4 Editing does not Alter CAR Expression or Antigen-Dependent Cell Killing

[0790] T cells were co-transfected with mRNA encoding a BE4 base editor along with sgRNAs that target specific sites in B2M, TRAC, and PD1. A chimeric antigen receptor (CAR) targeting BCMA was introduced by integration of a lentiviral vector encoding the anti-BCMA CAR. CAR expression was observed by flow cytometry in BE4 and Cas9 edited cells (FIG. 24), compared to untreated cells that did not receive the lentiviral vector. The CAR-T cells were evaluated for cell killing by nuclear staining of the cells expressing BCMA and detecting loss of nuclear staining, indicating cell death. Antigen dependent cell killing was observed in cells transduced with the vector and expressing the CAR, including BE4 and Cas9 edited T cells (FIG. 25). In contrast, untreated cells that were not transduced with the vector did not display cell killing activity. Thus, BE4-generated CAR-T cells demonstrated comparable gene disruption, cell phenotype, and antigen-dependent cell killing compared to their nuclease-only counterparts.

### Example 12: Cas12b and BE4 can be Paired for Highly Efficient Multiplex Editing in T Cells

[0791] CD3⁻, B2M⁻ T cells were generated using BE4 only or using BE4 and Cas12b. For T cells generated using BE4 only, T cells were co-transfected with mRNA encoding a BE4 base editor along with sgRNAs that target specific sites in B2M and TRAC. For T cells generated using BE4 and Cas12b, T cells were co-transfected with mRNA encoding a BE4 base editor, and an sgRNA that targets a specific site in B2M, mRNA encoding BhCas12b (V4), and a Cas12b sgRNA that targets exon 3 of the TRAC gene, which was used to disrupt the TRAC gene. The resulting T cells were assessed using fluorescence assisted cell sorting (FACS) analysis to detect B2M and CD3 cell surface expression. Knockouts using BE4 only displayed a similar profile to those using BE4 and Cas12b. In particular, a high percentage of the T cells were CD3⁻, B2M⁻: 86% (BE4 only) and 88% (BE4+Cas12b), while the other possible phenotypes CD3⁻, B2M⁺; CD3⁺, B2M⁺ T cells; and CD3⁺, B2M⁻ were represented less in the cell population (FIG. 26). In contrast, electroporation only control showed a population having a high percentage (97.8%) of CD3⁺ B2M⁺ cells and a very low percentage of CD3⁻, B2M⁻ cells.

[0792] Cas12b was used to generate CD3⁻, CAR⁺ T cells. T cells were co-transfected with mRNA encoding BhCas12b (V4), a Cas12b sgRNA that targets exon 3 of the TRAC gene, and a double-stranded DNA (dsDNA) donor template encoding BCMA02, an anti-BCMA CAR. T cells were assessed using fluorescence assisted cell sorting (FACS) analysis to detect CD3 and BCMA02 cell surface expression. When increasing amounts of Cas12b were introduced into the cell in the presence of the sgRNA, CD3 expression decreased, as seen by a shift in the cell population to the CD3⁻ quadrant (FIG. 27). When increasing amounts of donor template and were introduced in the cells under the same conditions, a shift to CD3⁻, CAR⁺ quadrant was observed in the cell population.

[0793] Thus, Cas12b can be paired with BE4 to generate multiplex-edited T cells, minimizing genomic rearrangements caused by multiple double-strand breaks.

### Example 13: High Efficiency Multiplex Knockout of Eight Targets

[0794] In this example, PBMCs were isolated from three donors and activated with soluble CD3 and CD28 antibodies. On day 3 after activation, T cells were electroporated with a reaction mixture including 2 microgm of recombinant BE4 and 1 microgm each of sgRNAs using a LONZA 4D electroporation device. (see Table 10 for sgRNA electroporated). Where indicated, half (½) gRNA dose is 0.5 microgm each of sgRNA; and 2× mRNA dose=4 microgm mRNA with 0.5 microgm of each sgRNA. sgRNA were obtained from Synthego or Agilent.

[0795] Percent knockdown of gene expression was measured by flow cytometry. To determine the base editing efficiency of CIITA gene, HLADR was used as the surrogate protein for staining. These results indicate that efficient and effective multiplex base editing can be successfully performed on a large number of genes simultaneously in single electroporation events.

TABLE 14

| Target | Target Sequence |
|---|---|
| CD3 | TTCGTATCTGTAAAACCAAG |
| CD7 | CCTACCTGTCACCAGGACCA |
| CD52 | CTCTTACCTGTACCATAACC |
| PD1 | CACCTACCTAAGAACCATCC |
| B2M | ACTCACGCTGGATAGCCTCC |
| CD5 | ACTCACCCAGCATCCCCAGC |
| CIITA | CACTCACCTTAGCCTGAGCA |
| CD2 | CACGCACCTGGACAGCTGAC |

[0796] As indicated in FIG. 28A and FIG. 28B, knockdown of each of the targeted genes was achieved.

### OTHER EMBODIMENTS

[0797] From the foregoing description, it will be apparent that variations and modifications may be made to the invention described herein to adopt it to various usages and conditions. Such embodiments are also within the scope of the following claims.

[0798] The recitation of a listing of elements in any definition of a variable herein includes definitions of that variable as any single element or combination (or subcombination) of listed elements. The recitation of an embodiment herein includes that embodiment as any single embodiment or in combination with any other embodiments or portions thereof.

[0799] All patents and publications mentioned in this specification are herein incorporated by reference to the same extent as if each independent patent and publication was specifically and individually indicated to be incorporated by reference.

The application's sequence listing, which the Patent Office published only in electronic form, follows.

SEQUENCE LISTING (3797 sequences)

SEQ ID NO: 1 - RNA, 20 nt, Artificial Sequence
  Description of Artificial Sequence: Synthetic oligonucleotide
uucguaucuguaaaaccaag

SEQ ID NO: 2 - RNA, 20 nt, Artificial Sequence
  Description of Artificial Sequence: Synthetic oligonucleotide
ccuaccugucaccaggacca

SEQ ID NO: 3 - RNA, 20 nt, Artificial Sequence
  Description of Artificial Sequence: Synthetic oligonucleotide
cucuuaccuguaccauaacc

SEQ ID NO: 4 - RNA, 20 nt, Artificial Sequence
  Description of Artificial Sequence: Synthetic oligonucleotide
caccuaccuaagaaccaucc

SEQ ID NO: 5 - RNA, 20 nt, Artificial Sequence
  Description of Artificial Sequence: Synthetic oligonucleotide
acucacgcuggauagccucc

SEQ ID NO: 6 - RNA, 20 nt, Artificial Sequence
  Description of Artificial Sequence: Synthetic oligonucleotide
acucacccagcauccccagc

SEQ ID NO: 7 - RNA, 20 nt, Artificial Sequence
  Description of Artificial Sequence: Synthetic oligonucleotide
cacucaccuuagccugagca

SEQ ID NO: 8 - RNA, 20 nt, Artificial Sequence
  Description of Artificial Sequence: Synthetic oligonucleotide
cacgcaccuggacagcugac

SEQ ID NO: 9 - protein, 167 aa, Escherichia coli
MSEVEFSHEYWMRHALTLAKRAWDEREVPVGAVLVHNNRVIGEGWNRPIGRHDPTAHAEIMALRQGGLVMQNYRLIDATLYVTLEPCVMCAGAMIHSRIGRVVFGARDAKTGAAGSLMDVLHHPGMNHRVEITEGILADECAALLSDFFRMRRQEIKAQKKAQSSTD

SEQ ID NO: 10 - protein, 178 aa, Escherichia coli
MRRAFITGVFFLSEVEFSHEYWMRHALTLAKRAWDEREVPVGAVLVHNNRVIGEGWNRPIGRHDPTAHAEIMALRQGGLVMQNYRLIDATLYVTLEPCVMCAGAMIHSRIGRVVFGARDAKTGAAGSLMDVLHHPGMNHRVEITEGILADECAALLSDFFRMRRQEIKAQKKAQSSTD

SEQ ID NO: 11 - protein, 160 aa, Staphylococcus aureus
MGSHMTNDIYFMTLAIEEAKKAAQLGEVPIGAIITKDDEVIARAHNLRETLQQPTAHAEHIAIERAAKVLGSWRLEGCTLYVTLEPCVMCAGTIVMSRIPRVVYGADDPKGGCSGSLMNLLQQSNFNHRAIVDKGVLKEACSTLLTTFFKNLRANKKSTN

SEQ ID NO: 12 - protein, 161 aa, Bacillus subtilis
MTQDELYMKEAIKEAKKAEEKGEVPIGAVLVINGEIIARAHNLRETEQRSIAHAEMLVIDEACKALGTWRLEGATLYVTLEPCPMCAGAVVLSRVEKVVFGAFDPKGGCSGTLMNLLQEERFNHQAEVVSGVLEEECGGMLSAFFRELRKKKKAARKNLSE

SEQ ID NO: 13 - protein, 183 aa, Salmonella typhimurium
MPPAFITGVTSLSDVELDHEYWMRHALTLAKRAWDEREVPVGAVLVHNHRVIGEGWNRPIGRHDPTAHAEIMALRQGGLVLQNYRLLDTTLYVTLEPCVMCAGAMVHSRIGRVVFGARDAKTGAAGSLIDVLHHPGMNHRVEIIEGVLRDECATLLSDFFRMRRQEIKALKKADRAEGAGPAV

SEQ ID NO: 14 - protein, 164 aa, Shewanella putrefaciens
MDEYWMQVAMQMAEKAEAAGEVPVGAVLVKDGQQIATGYNLSISQHDPTAHAEILCLRSAGKKLENYRLLDATLYITLEPCAMCAGAMVHSRIARVVYGARDEKTGAAGTVVNLLQHPAFNHQVEVTSGVLAEACSAQLSRFFKRRRDEKKALKLAQRAQQGIE

SEQ ID NO: 15 - protein, 173 aa, Haemophilus influenzae
MDAAKVRSEFDEKMMRYALELADKAEALGEIPVGAVLVDDARNIIGEGWNLSIVQSDPTAHAEIIALRNGAKNIQNYRLLNSTLYVTLEPCTMCAGAILHSRIKRLVFGASDYKTGAIGSRFHFFDDYKMNHTLEITSGVLAEECSQKLSTFFQKRREEKKIEKALLKSLSDK

SEQ ID NO: 16 - protein, 161 aa, Caulobacter crescentus
MRTDESEDQDHRMMRLALDAARAAAEAGETPVGAVILDPSTGEVIATAGNGPIAAHDPTAHAEIAAMRAAAAKLGNYRLTDLTLVVTLEPCAMCAGAISHARIGRVVFGADDPKGGAVVHGPKFFAQPTCHWRPEVTGGVLADESADLLRGFFRARRKAKI

SEQ ID NO: 17 - protein, 179 aa, Geobacter sulfurreducens
MSSLKKTPIRDDAYWMGKAIREAAKAAARDEVPIGAVIVRDGAVIGRGHNLREGSNDPSAHAEMIAIRQAARRSANWRLTGATLYVTLEPCLMCMGAIILARLERVVFGCYDPKGGAAGSLYDLSADPRLNHQVRLSPGVCQEECGTMLSDFFRDLRRRKKAKATPALFIDERKVPPEP

SEQ ID NO: 18 - protein, 167 aa, Artificial Sequence
  Description of Artificial Sequence: Synthetic polypeptide
MSEVEFSHEYWMRHALTLAKRARDEREVPVGAVLVLNNRVIGEGWNRAIGLHDPTAHAEIMALRQGGLVMQNYRLIDATLYVTFEPCVMCAGAMIHSRIGRVVFGVRNAKTGAAGSLMDVLHYPGMNHRVEITEGILADECAALLCYFFRMPRQVFNAQKKAQSSTD

SEQ ID NO: 19 - protein, 184 aa, Homo sapiens
MLQMAGQCSQNEYFDSLLHACIPCQLRCSSNTPPLTCQRYCNASVTNSVKGTNAILWTCLGLSLIISLAVFVLMFLLRKINSEPLKDEFKNTGSGLLGMANIDLEKSRTGDEIILPRGLEYTVEECTCEDCIKSKPKVDSDHCFPLPAMEEGATILVTTKTNDYCKSLPAALSATEIEKSISAR

SEQ ID NO: 20 - DNA, 994 bp, Homo sapiens
aagactcaaacttagaaacttgaattagatgtggtattcaaatccttagctgccgcgaagacacagacagcccccgtaagaacccacgaagcaggcgaagttcattgttctcaacattctagctgctcttgctgcatttgctctggaattcttgtagagatattacttgtccttccaggctgttctttctgtagctcccttgttttctttttgtgatcatgttgcagatggctgggcagtgctcccaaaatgaatattttgacagtttgttgcatgcttgcataccttgtcaacttcgatgttcttctaatactcctcctctaacatgtcagcgttattgtaatgcaagtgtgaccaattcagtgaaaggaacgaatgcgattctctggacctgtttgggactgagcttaataatttctttggcagttttcgtgctaatgtttttgctaaggaagataaactctgaaccattaaaggacgagtttaaaaacacaggatcaggtctcctgggcatggctaacattgacctggaaaagagcaggactggtgatgaaattattcttccgagaggcctcgagtacacggtggaagaatgcacctgtgaagactgcatcaagagcaaaccgaaggtcgactctgaccattgctttccactcccagctatggaggaaggcgcaaccattcttgtcaccacgaaaacgaatgactattgcaagagcctgccagctgctttgagtgctacggagatagagaaatcaatttctgctaggtaattaaccatttcgactcgagcagtgccactttaaaaatcttttgtcagaatagatgatgtgtcagatctctttaggatgactgtatttttcagttgccgatacagctttttgtcctctaactgtggaaactctttatgttagatatatttctctaggttactgttgggagcttaatggtagaaacttccttggtttcatgattaaactcttttttttcctga

SEQ ID NO: 21 - protein, 1410 aa, Artificial Sequence
  Description of Artificial Sequence: Synthetic polypeptide
EIGKATAKYFFYSNIMNFFKTEITLANGEIRKRPLIETNGETGEIVWDKGRDFATVRKVLSMPQVNIVKKTEVQTGGFSKESILPKRNSDKLIARKKDWDPKKYGGFMQPTVAYSVLVVAKVEKGKSKKLKSVKELLGITIMERSSFEKNPIDFLEAKGYKEVKKDLIIKLPKYSLFELENGRKRMLASAKFLQKGNELALPSKYVNFLYLASHYEKLKGSPEDNEQKQLFVEQHKHYLDEIIEQISEFSKRVILADANLDKVLSAYNKHRDKPIREQAENIIHLFTLTNLGAPRAFKYFDTTIARKEYRSTKEVLDATLIHQSITGLYETRIDLSQLGGDGGSGGSGGSGGSGGSGGSGGMDKKYSIGLAIGTNSVGWAVITDEYKVPSKKFKVLGNTDRHSIKKNLIGALLFDSGETAEATRLKRTARRRYTRRKNRICYLQEIFSNEMAKVDDSFFHRLEESFLVEEDKKHERHPIFGNIVDEVAYHEKYPTIYHLRKKLVDSTDKADLRLIYLALAHMIKFRGHFLIEGDLNPDNSDVDKLFIQLVQTYNQLFEENPINASGVDAKAILSARLSKSRRLENLIAQLPGEKKNGLFGNLIALSLGLTPNFKSNFDLAEDAKLQLSKDTYDDDLDNLLAQIGDQYADLFLAAKNLSDAILLSDILRVNTEITKAPLSASMIKRYDEHHQDLTLLKALVRQQLPEKYKEIFFDQSKNGYAGYIDGGASQEEFYKFIKPILEKMDGTEELLVKLNREDLLRKQRTFDNGSIPHQIHLGELHAILRRQEDFYPFLKDNREKIEKILTFRIPYYVGPLARGNSRFAWMTRKSEETITPWNFEEVVDKGASAQSFIERMTNFDKNLPNEKVLPKHSLLYEYFTVYNELTKVKYVTEGMRKPAFLSGEQKKAIVDLLFKTNRKVTVKQLKEDYFKKIECFDSVEISGVEDRFNASLGTYHDLLKIIKDKDFLDNEENEDILEDIVLTLTLFEDREMIEERLKTYAHLFDDKVMKQLKRRRYTGWGRLSRKLINGIRDKQSGKTILDFLKSDGFANRNFMQLIHDDSLTFKEDIQKAQVSGQGDSLHEHIANLAGSPAIKKGILQTVKVVDELVKVMGRHKPENIVIEMARENQTTQKGQKNSRERMKRIEEGIKELGSQILKEHPVENTQLQNEKLYLYYLQNGRDMYVDQELDINRLSDYDVDHIVPQSFLKDDSIDNKVLTRSDKNRGKSDNVPSEEVVKKMKNYWRQLLNAKLITQRKFDNLTKAERGGLSELDKAGFIKRQLVETRQITKHVAQILDSRMNTKYDENDKLIREVKVITLKSKLVSDFRKDFQFYKVREINNYHHAHDAYLNAVVGTALIKKYPKLESEFVYGDYKVYDVRKMIAKSEQEGADKRTADGSEFESPKKKRKV

SEQ ID NO: 22 - protein, 119 aa, Homo sapiens
MSRSVALAVLALLSLSGLEAIQRTPKIQVYSRHPAENGKSNFLNCYVSGFHPSDIEVDLLKNGERIEKVEHSDLSFSKDWSFYLLYYTEFTPTEKDEYACRVNHVTLSQPKIVKWDRDM

SEQ ID NO: 23 - DNA, 9199 bp, Homo sapiens
catgtcataaatggtaagtccaagaaaaatacaggtattcccccccaaagaaaactgtaaaatcgacttttttctatctgtactgttttttattggtttttaaattggttttccaagtgagtaaatcagaatctatctgtaatggattttaaatttagtgtttctctgtgatgtagtaaacaagaaactagaggcaaaaatagccctgtcccttgctaaacttctaaggcacttttctagtacaactcaacactaacatttcaggcctttagtgccttatatgagtttttaaaagggggaaaagggagggagcaagagtgtcttaactcatacatttaggcataacaattattctcatattttagttattgagagggctggtagaaaaactaggtaaataatattaataattatagcgcttattaaacactacagaacacttactatgtaccaggcattgtgggaggctctctcttgtgcattatctcatttcattaggtccatggagagtattgcattttcttagtttaggcatggcctccacaataaagattatcaaaagcctaaaaatatgtaaaagaaacctagaagttatttgttgtgctccttggggaagctaggcaaatcctttcaactgaaaaccatggtgacttccaagatctctgcccctccccatcgccatggtccacttcctcttctcactgttcctcttagaaaagatctgtggactccaccaccacgaaatggcggcaccttatttatggtcactttagagggtaggttttcttaatgggtctgcctgtcatgtttaacgtccttggctgggtccaaggcagatgcagtccaaactctcactaaaattgccgagccctttgtcttccagtgtctaaaatattaatgtcaatggaatcaggccagagtttgaattctagtctcttagcctttgtttcccctgtccataaaatgaatgggggtaattctttcctcctacagtttatttatatattcactaattcattcattcatccatccattcgttcattcggtttactgagtacctactatgtgccagcccctgttctagggtggaaactaagagaatgatgtacctagagggcgctggaagctctaaagccctagcagttactgcttttactattagtggtcgtttttttctcccccccgccccccgacaaatcaacagaacaaagaaaattacctaaacagcaaggacatagggaggaacttcttggcacagaactttccaaacactttttcctgaagggatacaagaagcaagaaaggtactctttcactaggaccttctctgagctgtcctcaggatgcttttgggactatttttcttacccagagaatggagaaaccctgcagggaattcccaagctgtagttataaacagaagttctccttctgctaggtagcattcaaagatcttaatcttctgggtttccgttttctcgaatgaaaaatgcaggtccgagcagttaactggctggggcaccattagcaagtcacttagcatctctggggccagtctgcaaagcgagggggcagccttaatgtgcctccagcctgaagtcctagaatgagcgcccggtgtcccaagctggggcgcgcaccccagatcggagggcgccgatgtacagacagcaaactcacccagtctagtgcatgccttcttaaacatcacgagactctaagaaaaggaaactgaaaacgggaaagtccctctctctaacctggcactgcgtcgctggcttggagacaggtgacggtccctgcgggccttgtcctgattggctgggcacgcgtttaatataagtggaggcgtcgcgctggcgggcattcctgaagctgacagcattcgggccgagatgtctcgctccgtggccttagctgtgctcgcgctactctctctttctggcctggaggctatccagcgtgagtctctcctaccctcccgctctggtccttcctctcccgctctgcaccctctgtggccctcgctgtgctctctcgctccgtgacttcccttctccaagttctccttggtggcccgccgtggggctagtccagggctggatctcggggaagcggcggggtggcctgggagtggggaagggggtgcgcacccgggacgcgcgctacttgcccctttcggcggggagcaggggagacctttggcctacggcgacgggagggtcgggacaaagtttagggcgtcgataagcgtcagagcgccgaggttgggggagggtttctcttccgctctttcgcggggcctctggctcccccagcgcagctggagtgggggacgggtaggctcgtcccaaaggcgcggcgctgaggtttgtgaacgcgtggaggggcgcttggggtctgggggaggcgtcgcccgggtaagcctgtctgctgcggctctgcttcccttagactggagagctgtggacttcgtctaggcgcccgctaagttcgcatgtcctagcacctctgggtctatgtggggccacaccgtggggaggaaacagcacgcgacgtttgtagaatgcttggctgtgatacaaagcggtttcgaataattaacttatttgttcccatcacatgtcacttttaaaaaattataagaactacccgttattgacatctttctgtgtgccaaggactttatgtgctttgcgtcatttaattttgaaaacagttatcttccgccatagataactactatggttatcttctgcctctcacagatgaagaaactaaggcaccgagattttaagaaacttaattacacaggggataaatggcagcaatcgagattgaagtcaagcctaaccagggcttttgcgggagcgcatgccttttggctgtaattcgtgcatttttttttaagaaaaacgcctgccttctgcgtgagattctccagagcaaactgggcggcatgggccctgtggtcttttcgtacagagggcttcctctttggctctttgcctggttgtttccaagatgtactgtgcctcttactttcggttttgaaaacatgagggggttgggcgtggtagcttacgcctgtaatcccagcacttagggaggccgaggcgggaggatggcttgaggtccgtagttgagaccagcctggccaacatggtgaagcctggtctctacaaaaaataataacaaaaattagccgggtgtggtggctcgtgcctgtggtcccagctgctccggtggctgaggcgggaggatctcttgagcttaggcttttgagctatcatggcgccagtgcactccagcgtgggcaacagagcgagaccctgtctctcaaaaaagaaaaaaaaaaaaaaagaaagagaaaagaaaagaaagaaagaagtgaaggtttgtcagtcaggggagctgtaaaaccattaataaagataatccaagatggttaccaagactgttgaggacgccagagatcttgagcactttctaagtacctggcaatacactaagcgcgctcaccttttcctctggcaaaacatgatcgaaagcagaatgttttgatcatgagaaaattgcatttaatttgaatacaatttatttacaacataaaggataatgtatatatcaccaccattactggtatttgctggttatgttagatgtcattttaaaaaataacaatctgatatttaaaaaaaaatcttattttgaaaatttccaaagtaatacatgccatgcatagaccatttctggaagataccacaagaaacatgtaatgatgattgcctctgaaggtctattttcctcctctgacctgtgtgtgggttttgtttttgttttactgtgggcataaattaatttttcagttaagttttggaagcttaaataactctccaaaagtcataaagccagtaactggttgagcccaaattcaaacccagcctgtctgatacttgtcctcttcttagaaaagattacagtgatgctctcacaaaatcttgccgccttccctcaaacagagagttccaggcaggatgaatctgtgctctgatccctgaggcatttaatatgttcttattattagaagctcagatgcaaagagctctcttagcttttaatgttatgaaaaaaatcaggtcttcattagattccccaatccacctcttgatggggctagtagcctttccttaatgatagggtgtttctagagagatatatctggtcaaggtggcctggtactcctccttctccccacagcctcccagacaaggaggagtagctgccttttagtgatcatgtaccctgaatataagtgtatttaaaagaattttatacacatatatttagtgtcaatctgtatatttagtagcactaacacttctcttcattttcaatgaaaaatatagagtttataatattttcttcccacttccccatggatggtctagtcatgcctctcattttggaaagtactgtttctgaaacattaggcaatatattcccaacctggctagtttacagcaatcacctgtggatgctaattaaaacgcaaatcccactgtcacatgcattactccatttgatcataatggaaagtatgttctgtcccatttgccatagtcctcacctatccctgttgtattttatcgggtccaactcaaccatttaaggtatttgccagctcttgtatgcatttaggttttgtttctttgttttttagctcatgaaattaggtacaaagtcagagaggggtctggcatataaaacctcagcagaaataaagaggttttgttgtttggtaagaacataccttgggttggttgggcacggtggctcgtgcctgtaatcccaacactttgggaggccaaggcaggctgatcacttgaagttgggagttcaagaccagcctggccaacatggtgaaatcccgtctctactgaaaatacaaaaattaaccaggcatggtggtgtgtgcctgtagtcccaggaatcacttgaacccaggaggcggaggttgcagtgagctgagatctcaccactgcacactgcactccagcctgggcaatggaatgagattccatcccaaaaaataaaaaaataaaaaaataaagaacataccttgggttgatccacttaggaacctcagataataacatctgccacgtatagagcaattgctatgtcccaggcactctactagacacttcatacagtttagaaaatcagatgggtgtagatcaaggcaggagcaggaaccaaaaagaaaggcataaacataagaaaaaaaatggaaggggtggaaacagagtacaataacatgagtaatttgatgggggctattatgaactgagaaatgaactttgaaaagtatcttggggccaaatcatgtagactcttgagtgatgtgttaaggaatgctatgagtgctgagagggcatcagaagtccttgagagcctccagagaaaggctcttaaaaatgcagcgcaatctccagtgacagaagatactgctagaaatctgctagaaaaaaaacaaaaaaggcatgtatagaggaattatgagggaaagataccaagtcacggtttattcttcaaaatggaggtggcttgttgggaaggtggaagctcatttggccagagtggaaatggaattgggagaaatcgatgaccaaatgtaaacacttggtgcctgatatagcttgacaccaagttagccccaagtgaaataccctggcaatattaatgtgtcttttcccgatattcctcaggtactccaaagattcaggtttactcacgtcatccagcagagaatggaaagtcaaatttcctgaattgctatgtgtctgggtttcatccatccgacattgaagttgacttactgaagaatggagagagaattgaaaaagtggagcattcagacttgtctttcagcaaggactggtctttctatctcttgtactacactgaattcacccccactgaaaaagatgagtatgcctgccgtgtgaaccatgtgactttgtcacagcccaagatagttaagtggggtaagtcttacattcttttgtaagctgctgaaagttgtgtatgagtagtcatatcataaagctgctttgatataaaaaaggtctatggccatactaccctgaatgagtcccatcccatctgatataaacaatctgcatattgggattgtcagggaatgttcttaaagatcagattagtggcacctgctgagatactgatgcacagcatggtttctgaaccagtagtttccctgcagttgagcagggagcagcagcagcacttgcacaaatacatatacactcttaacacttcttacctactggcttcctctagcttttgtggcagcttcaggtatatttagcactgaacgaacatctcaagaaggtataggcctttgtttgtaagtcctgctgtcctagcatcctataatcctggacttctccagtactttctggctggattggtatctgaggctagtaggaagggcttgttcctgctgggtagctctaaacaatgtattcatgggtaggaacagcagcctattctgccagccttatttctaaccattttagacatttgttagtacatggtattttaaaagtaaaacttaatgtcttccttttttttctccactgtctttttcatagatcgagacatgtaagcagcatcatggaggtaagtttttgaccttgagaaaatgtttttgtttcactgtcctgaggactatttatagacagctctaacatgataaccctcactatgtggagaacattgacagagtaacattttagcagggaaagaagaatcctacagggtcatgttcccttctcctgtggagtggcatgaagaaggtgtatggccccaggtatggccatattactgaccctctacagagagggcaaaggaactgccagtatggtattgcaggataaaggcaggtggttacccacattacctgcaaggctttgatctttcttctgccatttccacattggacatctctgctgaggagagaaaatgaaccactcttttcctttgtataatgttgttttattcttcagacagaagagaggagttatacagctctgcagacatcccattcctgtatggggactgtgtttgcctcttagaggttcccaggccactagaggagataaagggaaacagattgttataacttgatataatgatactataatagatgtaactacaaggagctccagaagcaagagagagggaggaacttggacttctctgcatctttagttggagtccaaaggcttttcaatgaaattctactgcccagggtacattgatgctgaaaccccattcaaatctcctgttatattctagaacagggaattgatttgggagagcatcaggaaggtggatgatctgcccagtcacactgttagtaaattgtagagccaggacctgaactctaatatagtcatgtgttacttaatgacggggacatgttctgagaaatgcttacacaaacctaggtgttgtagcctactacacgcataggctacatggtatagcctattgctcctagactacaaacctgtacagcctgttactgtactgaatactgtgggcagttgtaacacaatggtaagtatttgtgtatctaaacatagaagttgcagtaaaaatatgctattttaatcttatgagaccactgtcatatatacagtccatcattgaccaaaacatcatatcagcattttttcttctaagattttgggagcaccaaagggatacactaacaggatatactctttataatgggtttggagaactgtctgcagctacttcttttaaaaaggtgatctacacagtagaaattagacaagtttggtaatgagatctgcaatccaaataaaataaattcattgctaacctttttcttttcttttcaggtttgaagatgccgcatttggattggatgaattccaaattctgcttgcttgctttttaatattgatatgcttatacacttacactttatgcacaaaatgtagggttataataatgttaacatggacatgatcttctttataattctactttgagtgctgtctccatgtttgatgtatctgagcaggttgctccacaggtagctctaggagggctggcaacttagaggtggggagcagagaattctcttatccaacatcaacatcttggtcagatttgaactcttcaatctcttgcactcaaagcttgttaagatagttaagcgtgcataagttaacttccaatttacatactctgcttagaatttgggggaaaatttagaaatataattgacaggattattggaaatttgttataatgaatgaaacattttgtcatataagattcatatttacttcttatacatttgataaagtaaggcatggttgtggttaatctggtttatttttgttccacaagttaaataaatcataaaacttgatgtgttatctcttatatctcactcccactattacccctttattttcaaacagggaaacagtcttcaagttccacttggtaaaaaatgtgaaccccttgtatatagagtttggctcacagtgtaaagggcctcagtgattcacattttccagattaggaatctgatgctcaaagaagttaaatggcatagttggggtgacacagctgtctagtgggaggccagccttctatattttagccagcgttctttcctgcgggccaggtcatgaggagtatgcagactctaagagggagcaaaagtatctgaaggatttaatattttagcaaggaatagatatacaatcatcccttggtctccctgggggattggtttcaggaccccttcttggacaccaaatctatggatatttaagtcccttctataaaatggtatagtatttgcatataacctatccacatcctcctgtatactttaaatcatttctagattacttgtaatacctaatacaatgtaaatgctatgcaaatagttgttattgtttaaggaataatgacaagaaaaaaaagtctgtacatgctcagtaaagacacaaccatccctttttttccccagtgtttttgatccatggtttgctgaatccacagatgtggagcccctggatacggaaggcccgctgtactttgaatgacaaataacagatttaaa

SEQ ID NO: 24 - DNA, 4104 bp, Streptococcus pyogenes
atggataagaaatactcaataggcttagatatcggcacaaatagcgtcggatgggcggtgatcactgatgattataaggttccgtctaaaaagttcaaggttctgggaaatacagaccgccacagtatcaaaaaaaatcttataggggctcttttatttggcagtggagagacagcggaagcgactcgtctcaaacggacagctcgtagaaggtatacacgtcggaagaatcgtatttgttatctacaggagattttttcaaatgagatggcgaaagtagatgatagtttctttcatcgacttgaagagtcttttttggtggaagaagacaagaagcatgaacgtcatcctatttttggaaatatagtagatgaagttgcttatcatgagaaatatccaactatctatcatctgcgaaaaaaattggcagattctactgataaagcggatttgcgcttaatctatttggccttagcgcatatgattaagtttcgtggtcattttttgattgagggagatttaaatcctgataatagtgatgtggacaaactatttatccagttggtacaaatctacaatcaattatttgaagaaaaccctattaacgcaagtagagtagatgctaaagcgattctttctgcacgattgagtaaatcaagacgattagaaaatctcattgctcagctccccggtgagaagagaaatggcttgtttgggaatctcattgctttgtcattgggattgacccctaattttaaatcaaattttgatttggcagaagatgctaaattacagctttcaaaagatacttacgatgatgatttagataatttattggcgcaaattggagatcaatatgctgatttgtttttggcagctaagaatttatcagatgctattttactttcagatatcctaagagtaaatagtgaaataactaaggctcccctatcagcttcaatgattaagcgctacgatgaacatcatcaagacttgactcttttaaaagctttagttcgacaacaacttccagaaaagtataaagaaatcttttttgatcaatcaaaaaacggatatgcaggttatattgatgggggagctagccaagaagaattttataaatttatcaaaccaattttagaaaaaatggatggtactgaggaattattggtgaaactaaatcgtgaagatttgctgcgcaagcaacggacctttgacaacggctctattccccatcaaattcacttgggtgagctgcatgctattttgagaagacaagaagacttttatccatttttaaaagacaatcgtgagaagattgaaaaaatcttgacttttcgaattccttattatgttggtccattggcgcgtggcaatagtcgttttgcatggatgactcggaagtctgaagaaacaattaccccatggaattttgaagaagttgtcgataaaggtgcttcagctcaatcatttattgaacgcatgacaaactttgataaaaatcttccaaatgaaaaagtactaccaaaacatagtttgctttatgagtattttacggtttataacgaattgacaaaggtcaaatatgttactgagggaatgcgaaaaccagcatttctttcaggtgaacagaagaaagccattgttgatttactcttcaaaacaaatcgaaaagtaaccgttaagcaattaaaagaagattatttcaaaaaaatagaatgttttgatagtgttgaaatttcaggagttgaagatagatttaatgcttcattaggcgcctaccatgatttgctaaaaattattaaagataaagattttttggataatgaagaaaatgaagatatcttagaggatattgttttaacattgaccttatttgaagatagggggatgattgaggaaagacttaaaacatatgctcacctctttgatgataaggtgatgaaacagcttaaacgtcgccgttatactggttggggacgtttgtctcgaaaattgattaatggtattagggataagcaatctggcaaaacaatattagattttttgaaatcagatggttttgccaatcgcaattttatgcagctgatccatgatgatagtttgacatttaaagaagatattcaaaaagcacaggtgtctggacaaggccatagtttacatgaacagattgctaacttagctggcagtcctgctattaaaaaaggtattttacagactgtaaaaattgttgatgaactggtcaaagtaatggggcataagccagaaaatatcgttattgaaatggcacgtgaaaatcagacaactcaaaagggccagaaaaattcgcgagagcgtatgaaacgaatcgaagaaggtatcaaagaattaggaagtcagattcttaaagagcatcctgttgaaaatactcaattgcaaaatgaaaagctctatctctattatctacaaaatggaagagacatgtatgtggaccaagaattagatattaatcgtttaagtgattatgatgtcgatcacattgttccacaaagtttcattaaagacgattcaatagacaataaggtactaacgcgttctgataaaaatcgtggtaaatcggataacgttccaagtgaagaagtagtcaaaaagatgaaaaactattggagacaacttctaaacgccaagttaatcactcaacgtaagtttgataatttaacgaaagctgaacgtggaggtttgagtgaacttgataaagctggttttatcaaacgccaattggttgaaactcgccaaatcactaagcatgtggcacaaattttggatagtcgcatgaatactaaatacgatgaaaatgataaacttattcgagaggttaaagtgattaccttaaaatctaaattagtttctgacttccgaaaagatttccaattctataaagtacgtgagattaacaattaccatcatgcccatgatgcgtatctaaatgccgtcgttggaactgctttgattaagaaatatccaaaacttgaatcggagtttgtctatggtgattataaagtttatgatgttcgtaaaatgattgctaagtctgagcaagaaataggcaaagcaaccgcaaaatatttcttttactctaatatcatgaacttcttcaaaacagaaattacacttgcaaatggagagattcgcaaacgccctctaatcgaaactaatggggaaactggagaaattgtctgggataaagggcgagattttgccacagtgcgcaaagtattgtccatgccccaagtcaatattgtcaagaaaacagaagtacagacaggcggattctccaaggagtcaattttaccaaaaagaaattcggacaagcttattgctcgtaaaaaagactgggatccaaaaaaatatggtggttttgatagtccaacggtagcttattcagtcctagtggttgctaaggtggaaaaagggaaatcgaagaagttaaaatccgttaaagagttactagggatcacaattatggaaagaagttcctttgaaaaaaatccgattgactttttagaagctaaaggatataaggaagttaaaaaagacttaatcattaaactacctaaatatagtctttttgagttagaaaacggtcgtaaacggatgctggctagtgccggagaattacaaaaaggaaatgagctggctctgccaagcaaatatgtgaattttttatatttagctagtcattatgaaaagttgaagggtagtccagaagataacgaacaaaaacaattgtttgtggagcagcataagcattatttagatgagattattgagcaaatcagtgaattttctaagcgtgttattttagcagatgccaatttagataaagttcttagtgcatataacaaacatagagacaaaccaatacgtgaacaagcagaaaatattattcatttatttacgttgacgaatcttggagctcccgctgcttttaaatattttgatacaacaattgatcgtaaacgatatacgtctacaaaagaagttttagatgccactcttatccatcaatccatcactggtctttatgaaacacgcattgatttgagtcagctaggaggtgactga

SEQ ID NO: 25 - protein, 1367 aa, Streptococcus pyogenes
MDKKYSIGLDIGTNSVGWAVITDDYKVPSKKFKVLGNTDRHSIKKNLIGALLFGSGETAEATRLKRTARRRYTRRKNRICYLQEIFSNEMAKVDDSFFHRLEESFLVEEDKKHERHPIFGNIVDEVAYHEKYPTIYHLRKKLADSTDKADLRLIYLALAHMIKFRGHFLIEGDLNPDNSDVDKLFIQLVQIYNQLFEENPINASRVDAKAILSARLSKSRRLENLIAQLPGEKRNGLFGNLIALSLGLTPNFKSNFDLAEDAKLQLSKDTYDDDLDNLLAQIGDQYADLFLAAKNLSDAILLSDILRVNSEITKAPLSASMIKRYDEHHQDLTLLKALVRQQLPEKYKEIFFDQSKNGYAGYIDGGASQEEFYKFIKPILEKMDGTEELLVKLNREDLLRKQRTFDNGSIPHQIHLGELHAILRRQEDFYPFLKDNREKIEKILTFRIPYYVGPLARGNSRFAWMTRKSEETITPWNFEEVVDKGASAQSFIERMTNFDKNLPNEKVLPKHSLLYEYFTVYNELTKVKYVTEGMRKPAFLSGEQKKAIVDLLFKTNRKVTVKQLKEDYFKKIECFDSVEISGVEDRFNASLGAYHDLLKIIKDKDFLDNEENEDILEDIVLTLTLFEDRGMIEERLKTYAHLFDDKVMKQLKRRRYTGWGRLSRKLINGIRDKQSGKTILDFLKSDGFANRNFMQLIHDDSLTFKEDIQKAQVSGQGHSLHEQIANLAGSPAIKKGILQTVKIVDELVKVMGHKPENIVIEMARENQTTQKGQKNSRERMKRIEEGIKELGSQILKEHPVENTQLQNEKLYLYYLQNGRDMYVDQELDINRLSDYDVDHIVPQSFIKDDSIDNKVLTRSDKNRGKSDNVPSEEVVKKMKNYWRQLLNAKLITQRKFDNLTKAERGGLSELDKAGFIKRQLVETRQITKHVAQILDSRMNTKYDENDKLIREVKVITLKSKLVSDFRKDFQFYKVREINNYHHAHDAYLNAVVGTALIKKYPKLESEFVYGDYKVYDVRKMIAKSEQEIGKATAKYFFYSNIMNFFKTEITLANGEIRKRPLIETNGETGEIVWDKGRDFATVRKVLSMPQVNIVKKTEVQTGGFSKESILPKRNSDKLIARKKDWDPKKYGGFDSPTVAYSVLVVAKVEKGKSKKLKSVKELLGITIMERSSFEKNPIDFLEAKGYKEVKKDLIIKLPKYSLFELENGRKRMLASAGELQKGNELALPSKYVNFLYLASHYEKLKGSPEDNEQKQLFVEQHKHYLDEIIEQISEFSKRVILADANLDKVLSAYNKHRDKPIREQAENIIHLFTLTNLGAPAAFKYFDTTIDRKRYTSTKEVLDATLIHQSITGLYETRIDLSQLGGD

SEQ ID NO: 26 - DNA, 4212 bp, Streptococcus pyogenes
atggataaaaagtattctattggtttagacatcggcactaattccgttggatgggctgtcataaccgatgaatacaaagtaccttcaaagaaatttaaggtgttggggaacacagaccgtcattcgattaaaaagaatcttatcggtgccctcctattcgatagtggcgaaacggcagaggcgactcgcctgaaacgaaccgctcggagaaggtatacacgtcgcaagaaccgaatatgttacttacaagaaatttttagcaatgagatggccaaagttgacgattctttctttcaccgtttggaagagtccttccttgtcgaagaggacaagaaacatgaacggcaccccatctttggaaacatagtagatgaggtggcatatcatgaaaagtacccaacgatttatcacctcagaaaaaagctagttgactcaactgataaagcggacctgaggttaatctacttggctcttgcccatatgataaagttccgtgggcactttctcattgagggtgatctaaatccggacaactcggatgtcgacaaactgttcatccagttagtacaaacctataatcagttgtttgaagagaaccctataaatgcaagtggcgtggatgcgaaggctattcttagcgcccgcctctctaaatcccgacggctagaaaacctgatcgcacaattacccggagagaagaaaaatgggttgttcggtaaccttatagcgctctcactaggcctgacaccaaattttaagtcgaacttcgacttagctgaagatgccaaattgcagcttagtaaggacacgtacgatgacgatctcgacaatctactggcacaaattggagatcagtatgcggacttatttttggctgccaaaaaccttagcgatgcaatcctcctatctgacatactgagagttaatactgagattaccaaggcgccgttatccgcttcaatgatcaaaaggtacgatgaacatcaccaagacttgacacttctcaaggccctagtccgtcagcaactgcctgagaaatataaggaaatattctttgatcagtcgaaaaacgggtacgcaggttatattgacggcggagcgagtcaagaggaattctacaagtttatcaaacccatattagagaagatggatgggacggaagagttgcttgtaaaactcaatcgcgaagatctactgcgaaagcagcggactttcgacaacggtagcattccacatcaaatccacttaggcgaattgcatgctatacttagaaggcaggaggatttttatccgttcctcaaagacaatcgtgaaaagattgagaaaatcctaacctttcgcataccttactatgtgggacccctggcccgagggaactctcggttcgcatggatgacaagaaagtccgaagaaacgattactccatggaattttgaggaagttgtcgataaaggtgcgtcagctcaatcgttcatcgagaggatgaccaactttgacaagaatttaccgaacgaaaaagtattgcctaagcacagtttactttacgagtatttcacagtgtacaatgaactcacgaaagttaagtatgtcactgagggcatgcgtaaacccgcctttctaagcggagaacagaagaaagcaatagtagatctgttattcaagaccaaccgcaaagtgacagttaagcaattgaaagaggactactttaagaaaattgaatgcttcgattctgtcgagatctccggggtagaagatcgatttaatgcgtcacttggtacgtatcatgacctcctaaagataattaaagataaggacttcctggataacgaagagaatgaagatatcttagaagatatagtgttgactcttaccctctttgaagatcgggaaatgattgaggaaagactaaaaacatacgctcacctgttcgacgataaggttatgaaacagttaaagaggcgtcgctatacgggctggggacgattgtcgcggaaacttatcaacgggataagagacaagcaaagtggtaaaactattctcgattttctaaagagcgacggcttcgccaataggaactttatgcagctgatccatgatgactctttaaccttcaaagaggatatacaaaaggcacaggtttccggacaaggggactcattgcacgaacatattgcgaatcttgctggttcgccagccatcaaaaagggcatactccagacagtcaaagtagtggatgagctagttaaggtcatgggacgtcacaaaccggaaaacattgtaatcgagatggcacgcgaaaatcaaacgactcagaaggggcaaaaaaacagtcgagagcggatgaagagaatagaagagggtattaaagaactgggcagccagatcttaaaggagcatcctgtggaaaatacccaattgcagaacgagaaactttacctctattacctacaaaatggaagggacatgtatgttgatcaggaactggacataaaccgtttatctgattacgacgtcgatcacattgtaccccaatcctttttgaaggacgattcaatcgacaataaagtgcttacacgctcggataagaaccgagggaaaagtgacaatgttccaagcgaggaagtcgtaaagaaaatgaagaactattggcggcagctcctaaatgcgaaactgataacgcaaagaaagttcgataacttaactaaagctgagaggggtggcttgtctgaacttgacaaggccggatttattaaacgtcagctcgtggaaacccgccaaatcacaaagcatgttgcacagatactagattcccgaatgaatacgaaatacgacgagaacgataagctgattcgggaagtcaaagtaatcactttaaagtcaaaattggtgtcggacttcagaaaggattttcaattctataaagttagggagataaataactaccaccatgcgcacgacgcttatcttaatgccgtcgtagggaccgcactcattaagaaatacccgaagctagaaagtgagtttgtgtatggtgattacaaagtttatgacgtccgtaagatgatcgcgaaaagcgaacaggagataggcaaggctacagccaaatacttcttttattctaacattatgaatttctttaagacggaaatcactctggcaaacggagagatacgcaaacgacctttaattgaaaccaatggggagacaggtgaaatcgtatgggataagggccgggacttcgcgacggtgagaaaagttttgtccatgccccaagtcaacatagtaaagaaaactgaggtgcagaccggagggttttcaaaggaatcgattcttccaaaaaggaatagtgataagctcatcgctcgtaaaaaggactgggacccgaaaaagtacggtggcttcgatagccctacagttgcctattctgtcctagtagtggcaaaagttgagaagggaaaatccaagaaactgaagtcagtcaaagaattattggggataacgattatggagcgctcgtcttttgaaaagaaccccatcgacttccttgaggcgaaaggttacaaggaagtaaaaaaggatctcataattaaactaccaaagtatagtctgtttgagttagaaaatggccgaaaacggatgttggctagcgccggagagcttcaaaaggggaacgaactcgcactaccgtctaaatacgtgaatttcctgtatttagcgtcccattacgagaagttgaaaggttcacctgaagataacgaacagaagcaactttttgttgagcagcacaaacattatctcgacgaaatcatagagcaaatttcggaattcagtaagagagtcatcctagctgatgccaatctggacaaagtattaagcgcatacaacaagcacagggataaacccatacgtgagcaggcggaaaatattatccatttgtttactcttaccaacctcggcgctccagccgcattcaagtattttgacacaacgatagatcgcaaacgatacacttctaccaaggaggtgctagacgcgacactgattcaccaatccatcacgggattatatgaaactcggatagatttgtcacagcttgggggtgacggatcccccaagaagaagaggaaagtctcgagcgactacaaagaccatgacggtgattataaagatcatgacatcgattacaaggatgacgatgacaaggctgcagga

SEQ ID NO: 27 - protein, 1368 aa, Streptococcus pyogenes
MDKKYSIGLAIGTNSVGWAVITDEYKVPSKKFKVLGNTDRHSIKKNLIGALLFDSGETAEATRLKRTARRRYTRRKNRICYLQEIFSNEMAKVDDSFFHRLEESFLVEEDKKHERHPIFGNIVDEVAYHEKYPTIYHLRKKLVDSTDKADLRLIYLALAHMIKFRGHFLIEGDLNPDNSDVDKLFIQLVQTYNQLFEENPINASGVDAKAILSARLSKSRRLENLIAQLPGEKKNGLFGNLIALSLGLTPNFKSNFDLAEDAKLQLSKDTYDDDLDNLLAQIGDQYADLFLAAKNLSDAILLSDILRVNTEITKAPLSASMIKRYDEHHQDLTLLKALVRQQLPEKYKEIFFDQSKNGYAGYIDGGASQEEFYKFIKPILEKMDGTEELLVKLNREDLLRKQRTFDNGSIPHQIHLGELHAILRRQEDFYPFLKDNREKIEKILTFRIPYYVGPLARGNSRFAWMTRKSEETITPWNFEEVVDKGASAQSFIERMTNFDKNLPNEKVLPKHSLLYEYFTVYNELTKVKYVTEGMRKPAFLSGEQKKAIVDLLFKTNRKVTVKQLKEDYFKKIECFDSVEISGVEDRFNASLGTYHDLLKIIKDKDFLDNEENEDILEDIVLTLTLFEDREMIEERLKTYAHLFDDKVMKQLKRRRYTGWGRLSRKLINGIRDKQSGKTILDFLKSDGFANRNFMQLIHDDSLTFKEDIQKAQVSGQGDSLHEHIANLAGSPAIKKGILQTVKVVDELVKVMGRHKPENIVIEMARENQTTQKGQKNSRERMKRIEEGIKELGSQILKEHPVENTQLQNEKLYLYYLQNGRDMYVDQELDINRLSDYDVDHIVPQSFLKDDSIDNKVLTRSDKNRGKSDNVPSEEVVKKMKNYWRQLLNAKLITQRKFDNLTKAERGGLSELDKAGFIKRQLVETRQITKHVAQILDSRMNTKYDENDKLIREVKVITLKSKLVSDFRKDFQFYKVREINNYHHAHDAYLNAVVGTALIKKYPKLESEFVYGDYKVYDVRKMIAKSEQEIGKATAKYFFYSNIMNFFKTEITLANGEIRKRPLIETNGETGEIVWDKGRDFATVRKVLSMPQVNIVKKTEVQTGGFSKESILPKRNSDKLIARKKDWDPKKYGGFDSPTVAYSVLVVAKVEKGKSKKLKSVKELLGITIMERSSFEKNPIDFLEAKGYKEVKKDLIIKLPKYSLFELENGRKRMLASAGELQKGNELALPSKYVNFLYLASHYEKLKGSPEDNEQKQLFVEQHKHYLDEIIEQISEFSKRVILADANLDKVLSAYNKHRDKPIREQAENIIHLFTLTNLGAPAAFKYFDTTIDRKRYTSTKEVLDATLIHQSITGLYETRIDLSQLGGD

SEQ ID NO: 28 - DNA, 4107 bp, Streptococcus pyogenes
atggataagaaatactcaataggcttagatatcggcacaaatagcgtcggatgggcggtgatcactgatgaatataaggttccgtctaaaaagttcaaggttctgggaaatacagaccgccacagtatcaaaaaaaatcttataggggctcttttatttgacagtggagagacagcggaagcgactcgtctcaaacggacagctcgtagaaggtatacacgtcggaagaatcgtatttgttatctacaggagattttttcaaatgagatggcgaaagtagatgatagtttctttcatcgacttgaagagtcttttttggtggaagaagacaagaagcatgaacgtcatcctatttttggaaatatagtagatgaagttgcttatcatgagaaatatccaactatctatcatctgcgaaaaaaattggtagattctactgataaagcggatttgcgcttaatctatttggccttagcgcatatgattaagtttcgtggtcattttttgattgagggagatttaaatcctgataatagtgatgtggacaaactatttatccagttggtacaaacctacaatcaattatttgaagaaaaccctattaacgcaagtggagtagatgctaaagcgattctttctgcacgattgagtaaatcaagacgattagaaaatctcattgctcagctccccggtgagaagaaaaatggcttatttgggaatctcattgctttgtcattgggtttgacccctaattttaaatcaaattttgatttggcagaagatgctaaattacagctttcaaaagatacttacgatgatgatttagataatttattggcgcaaattggagatcaatatgctgatttgtttttggcagctaagaatttatcagatgctattttactttcagatatcctaagagtaaatactgaaataactaaggctcccctatcagcttcaatgattaaacgctacgatgaacatcatcaagacttgactcttttaaaagctttagttcgacaacaacttccagaaaagtataaagaaatcttttttgatcaatcaaaaaacggatatgcaggttatattgatgggggagctagccaagaagaattttataaatttatcaaaccaattttagaaaaaatggatggtactgaggaattattggtgaaactaaatcgtgaagatttgctgcgcaagcaacggacctttgacaacggctctattccccatcaaattcacttgggtgagctgcatgctattttgagaagacaagaagacttttatccatttttaaaagacaatcgtgagaagattgaaaaaatcttgacttttcgaattccttattatgttggtccattggcgcgtggcaatagtcgttttgcatggatgactcggaagtctgaagaaacaattaccccatggaattttgaagaagttgtcgataaaggtgcttcagctcaatcatttattgaacgcatgacaaactttgataaaaatcttccaaatgaaaaagtactaccaaaacatagtttgctttatgagtattttacggtttataacgaattgacaaaggtcaaatatgttactgaaggaatgcgaaaaccagcatttctttcaggtgaacagaagaaagccattgttgatttactcttcaaaacaaatcgaaaagtaaccgttaagcaattaaaagaagattatttcaaaaaaatagaatgttttgatagtgttgaaatttcaggagttgaagatagatttaatgcttcattaggtacctaccatgatttgctaaaaattattaaagataaagattttttggataatgaagaaaatgaagatatcttagaggatattgttttaacattgaccttatttgaagatagggagatgattgaggaaagacttaaaacatatgctcacctctttgatgataaggtgatgaaacagcttaaacgtcgccgttatactggttggggacgtttgtctcgaaaattgattaatggtattagggataagcaatctggcaaaacaatattagattttttgaaatcagatggttttgccaatcgcaattttatgcagctgatccatgatgatagtttgacatttaaagaagacattcaaaaagcacaagtgtctggacaaggcgatagtttacatgaacatattgcaaatttagctggtagccctgctattaaaaaaggtattttacagactgtaaaagttgttgatgaattggtcaaagtaatggggcggcataagccagaaaatatcgttattgaaatggcacgtgaaaatcagacaactcaaaagggccagaaaaattcgcgagagcgtatgaaacgaatcgaagaaggtatcaaagaattaggaagtcagattcttaaagagcatcctgttgaaaatactcaattgcaaaatgaaaagctctatctctattatctccaaaatggaagagacatgtatgtggaccaagaattagatattaatcgtttaagtgattatgatgtcgatcacattgttccacaaagtttccttaaagacgattcaatagacaataaggtcttaacgcgttctgataaaaatcgtggtaaatcggataacgttccaagtgaagaagtagtcaaaaagatgaaaaactattggagacaacttctaaacgccaagttaatcactcaacgtaagtttgataatttaacgaaagctgaacgtggaggtttgagtgaacttgataaagctggttttatcaaacgccaattggttgaaactcgccaaatcactaagcatgtggcacaaattttggatagtcgcatgaatactaaatacgatgaaaatgataaacttattcgagaggttaaagtgattaccttaaaatctaaattagtttctgacttccgaaaagatttccaattctataaagtacgtgagattaacaattaccatcatgcccatgatgcgtatctaaatgccgtcgttggaactgctttgattaagaaatatccaaaacttgaatcggagtttgtctatggtgattataaagtttatgatgttcgtaaaatgattgctaagtctgagcaagaaataggcaaagcaaccgcaaaatatttcttttactctaatatcatgaacttcttcaaaacagaaattacacttgcaaatggagagattcgcaaacgccctctaatcgaaactaatggggaaactggagaaattgtctgggataaagggcgagattttgccacagtgcgcaaagtattgtccatgccccaagtcaatattgtcaagaaaacagaagtacagacaggcggattctccaaggagtcaattttaccaaaaagaaattcggacaagcttattgctcgtaaaaaagactgggatccaaaaaaatatggtggttttgatagtccaacggtagcttattcagtcctagtggttgctaaggtggaaaaagggaaatcgaagaagttaaaatccgttaaagagttactagggatcacaattatggaaagaagttcctttgaaaaaaatccgattgactttttagaagctaaaggatataaggaagttaaaaaagacttaatcattaaactacctaaatatagtctttttgagttagaaaacggtcgtaaacggatgctggctagtgccggagaattacaaaaaggaaatgagctggctctgccaagcaaatatgtgaattttttatatttagctagtcattatgaaaagttgaagggtagtccagaagataacgaacaaaaacaattgtttgtggagcagcataagcattatttagatgagattattgagcaaatcagtgaattttctaagcgtgttattttagcagatgccaatttagataaagttcttagtgcatataacaaacatagagacaaaccaatacgtgaacaagcagaaaatattattcatttatttacgttgacgaatcttggagctcccgctgcttttaaatattttgatacaacaattgatcgtaaacgatatacgtctacaaaagaagttttagatgccactcttatccatcaatccatcactggtctttatgaaacacgcattgatttgagtcagctaggaggtgactga

SEQ ID NO: 29 - protein, 1368 aa, Streptococcus pyogenes [sequence omitted]

SEQ ID NO: 30 - protein, 1368 aa, Artificial Sequence
  Description of Artificial Sequence: Synthetic polypeptide
MDKKYSIGLAIGTNSVGWAVITDEYKVPSKKFKVLGNTDRHSIKKNLIGALLFDSGETAEATRLKRTARRRYTRRKNRICYLQEIFSNEMAKVDDSFFHRLEESFLVEEDKKHERHPIFGNIVDEVAYHEKYPTIYHLRKKLVDSTDKADLRLIYLALAHMIKFRGHFLIEGDLNPDNSDVDKLFIQLVQTYNQLFEENPINASGVDAKAILSARLSKSRRLENLIAQLPGEKKNGLFGNLIALSLGLTPNFKSNFDLAEDAKLQLSKDTYDDDLDNLLAQIGDQYADLFLAAKNLSDAILLSDILRVNTEITKAPLSASMIKRYDEHHQDLTLLKALVRQQLPEKYKEIFFDQSKNGYAGYIDGGASQEEFYKFIKPILEKMDGTEELLVKLNREDLLRKQRTFDNGSIPHQIHLGELHAILRRQEDFYPFLKDNREKIEKILTFRIPYYVGPLARGNSRFAWMTRKSEETITPWNFEEVVDKGASAQSFIERMTNFDKNLPNEKVLPKHSLLYEYFTVYNELTKVKYVTEGMRKPAFLSGEQKKAIVDLLFKTNRKVTVKQLKEDYFKKIECFDSVEISGVEDRFNASLGTYHDLLKIIKDKDFLDNEENEDILEDIVLTLTLFEDREMIEERLKTYAHLFDDKVMKQLKRRRYTGWGRLSRKLINGIRDKQSGKTILDFLKSDGFANRNFMQLIHDDSLTFKEDIQKAQVSGQGDSLHEHIANLAGSPAIKKGILQTVKVVDELVKVMGRHKPENIVIEMARENQTTQKGQKNSRERMKRIEEGIKELGSQILKEHPVENTQLQNEKLYLYYLQNGRDMYVDQELDINRLSDYDVDAIVPQSFLKDDSIDNKVLTRSDKNRGKSDNVPSEEVVKKMKNYWRQLLNAKLITQRKFDNLTKAERGGLSELDKAGFIKRQLVETRQITKHVAQILDSRMNTKYDENDKLIREVKVITLKSKLVSDFRKDFQFYKVREINNYHHAHDAYLNAVVGTALIKKYPKLESEFVYGDYKVYDVRKMIAKSEQEIGKATAKYFFYSNIMNFFKTEITLANGEIRKRPLIETNGETGEIVWDKGRDFATVRKVLSMPQVNIVKKTEVQTGGFSKESILPKRNSDKLIARKKDWDPKKYGGFDSPTVAYSVLVVAKVEKGKSKKLKSVKELLGITIMERSSFEKNPIDFLEAKGYKEVKKDLIIKLPKYSLFELENGRKRMLASAGELQKGNELALPSKYVNFLYLASHYEKLKGSPEDNEQKQLFVEQHKHYLDEIIEQISEFSKRVILADANLDKVLSAYNKHRDKPIREQAENIIHLFTLTNLGAPAAFKYFDTTIDRKRYTSTKEVLDATLIHQSITGLYETRIDLSQLGGD

SEQ ID NO: 31 - protein, 1367 aa, Artificial Sequence
  Description of Artificial Sequence: Synthetic polypeptide
DKKYSIGLAIGTNSVGWAVITDEYKVPSKKFKVLGNTDRHSIKKNLIGALLFDSGETAEATRLKRTARRRYTRRKNRICYLQEIFSNEMAKVDDSFFHRLEESFLVEEDKKHERHPIFGNIVDEVAYHEKYPTIYHLRKKLVDSTDKADLRLIYLALAHMIKFRGHFLIEGDLNPDNSDVDKLFIQLVQTYNQLFEENPINASGVDAKAILSARLSKSRRLENLIAQLPGEKKNGLFGNLIALSLGLTPNFKSNFDLAEDAKLQLSKDTYDDDLDNLLAQIGDQYADLFLAAKNLSDAILLSDILRVNTEITKAPLSASMIKRYDEHHQDLTLLKALVRQQLPEKYKEIFFDQSKNGYAGYIDGGASQEEFYKFIKPILEKMDGTEELLVKLNREDLLRKQRTFDNGSIPHQIHLGELHAILRRQEDFYPFLKDNREKIEKILTFRIPYYVGPLARGNSRFAWMTRKSEETITPWNFEEVVDKGASAQSFIERMTNFDKNLPNEKVLPKHSLLYEYFTVYNELTKVKYVTEGMRKPAFLSGEQKKAIVDLLFKTNRKVTVKQLKEDYFKKIECFDSVEISGVEDRFNASLGTYHDLLKIIKDKDFLDNEENEDILEDIVLTLTLFEDREMIEERLKTYAHLFDDKVMKQLKRRRYTGWGRLSRKLINGIRDKQSGKTILDFLKSDGFANRNFMQLIHDDSLTFKEDIQKAQVSGQGDSLHEHIANLAGSPAIKKGILQTVKVVDELVKVMGRHKPENIVIEMARENQTTQKGQKNSRERMKRIEEGIKELGSQILKEHPVENTQLQNEKLYLYYLQNGRDMYVDQELDINRLSDYDVDAIVPQSFLKDDSIDNKVLTRSDKNRGKSDNVPSEEVVKKMKNYWRQLLNAKLITQRKFDNLTKAERGGLSELDKAGFIKRQLVETRQITKHVAQILDSRMNTKYDENDKLIREVKVITLKSKLVSDFRKDFQFYKVREINNYHHAHDAYLNAVVGTALIKKYPKLESEFVYGDYKVYDVRKMIAKSEQEIGKATAKYFFYSNIMNFFKTEITLANGEIRKRPLIETNGETGEIVWDKGRDFATVRKVLSMPQVNIVKKTEVQTGGFSKESILPKRNSDKLIARKKDWDPKKYGGFDSPTVAYSVLVVAKVEKGKSKKLKSVKELLGITIMERSSFEKNPIDFLEAKGYKEVKKDLIIKLPKYSLFELENGRKRMLASAGELQKGNELALPSKYVNFLYLASHYEKLKGSPEDNEQKQLFVEQHKHYLDEIIEQISEFSKRVILADANLDKVLSAYNKHRDKPIREQAENIIHLFTLTNLGAPAAFKYFDTTIDRKRYTSTKEVLDATLIHQSITGLYETRIDLSQLGGD

SEQ ID NO: 32 - protein, 1367 aa, Artificial Sequence
  Description of Artificial Sequence: Synthetic polypeptide
DKKYSIGLAIGTNSVGWAVITDEYKVPSKKFKVLGNTDRHSIKKNLIGALLFDSGETAEATRLKRTARRRYTRRKNRICYLQEIFSNEMAKVDDSFFHRLEESFLVEEDKKHERHPIFGNIVDEVAYHEKYPTIYHLRKKLVDSTDKADLRLIYLALAHMIKFRGHFLIEGDLNPDNSDVDKLFIQLVQTYNQLFEENPINASGVDAKAILSARLSKSRRLENLIAQLPGEKKNGLFGNLIALSLGLTPNFKSNFDLAEDAKLQLSKDTYDDDLDNLLAQIGDQYADLFLAAKNLSDAILLSDILRVNTEITKAPLSASMIKRYDEHHQDLTLLKALVRQQLPEKYKEIFFDQSKNGYAGYIDGGASQEEFYKFIKPILEKMDGTEELLVKLNREDLLRKQRTFDNGSIPHQIHLGELHAILRRQEDFYPFLKDNREKIEKILTFRIPYYVGPLARGNSRFAWMTRKSEETITPWNFEEVVDKGASAQSFIERMTNFDKNLPNEKVLPKHSLLYEYFTVYNELTKVKYVTEGMRKPAFLSGEQKKAIVDLLFKTNRKVTVKQLKEDYFKKIECFDSVEISGVEDRFNASLGTYHDLLKIIKDKDFLDNEENEDILEDIVLTLTLFEDREMIEERLKTYAHLFDDKVMKQLKRRRYTGWGRLSRKLINGIRDKQSGKTILDFLKSDGFANRNFMQLIHDDSLTFKEDIQKAQVSGQGDSLHEHIANLAGSPAIKKGILQTVKVVDELVKVMGRHKPENIVIEMARENQTTQKGQKNSRERMKRIEEGIKELGSQILKEHPVENTQLQNEKLYLYYLQNGRDMYVDQELDINRLSDYDVDHIVPQSFLKDDSIDNKVLTRSDKNRGKSDNVPSEEVVKKMKNYWRQLLNAKLITQRKFDNLTKAERGGLSELDKAGFIKRQLVETRQITKHVAQILDSRMNTKYDENDKLIREVKVITLKSKLVSDFRKDFQFYKVREINNYHHAHDAYLNAVVGTALIKKYPKLESEFVYGDYKVYDVRKMIAKSEQEIGKATAKYFFYSNIMNFFKTEITLANGEIRKRPLIETNGETGEIVWDKGRDFATVRKVLSMPQVNIVKKTEVQTGGFSKESILPKRNSDKLIARKKDWDPKKYGGFDSPTVAYSVLVVAKVEKGKSKKLKSVKELLGITIMERSSFEKNPIDFLEAKGYKEVKKDLIIKLPKYSLFELENGRKRMLASAGELQKGNELALPSKYVNFLYLASHYEKLKGSPEDNEQKQLFVEQHKHYLDEIIEQISEFSKRVILADANLDKVLSAYNKHRDKPIREQAENIIHLFTLTNLGAPAAFKYFDTTIDRKRYTSTKEVLDATLIHQSITGLYETRIDLSQLGGD

SEQ ID NO: 33 - protein, 1367 aa, Artificial Sequence
  Description of Artificial Sequence: Synthetic polypeptide
DKKYSIGLDIGTNSVGWAVITDEYKVPSKKFKVLGNTDRHSIKKNLIGALLFDSGETAEATRLKRTARRRYTRRKNRICYLQEIFSNEMAKVDDSFFHRLEESFLVEEDKKHERHPIFGNIVDEVAYHEKYPTIYHLRKKLVDSTDKADLRLIYLALAHMIKFRGHFLIEGDLNPDNSDVDKLFIQLVQTYNQLFEENPINASGVDAKAILSARLSKSRRLENLIAQLPGEKKNGLFGNLIALSLGLTPNFKSNFDLAEDAKLQLSKDTYDDDLDNLLAQIGDQYADLFLAAKNLSDAILLSDILRVNTEITKAPLSASMIKRYDEHHQDLTLLKALVRQQLPEKYKEIFFDQSKNGYAGYIDGGASQEEFYKFIKPILEKMDGTEELLVKLNREDLLRKQRTFDNGSIPHQIHLGELHAILRRQEDFYPFLKDNREKIEKILTFRIPYYVGPLARGNSRFAWMTRKSEETITPWNFEEVVDKGASAQSFIERMTNFDKNLPNEKVLPKHSLLYEYFTVYNELTKVKYVTEGMRKPAFLSGEQKKAIVDLLFKTNRKVTVKQLKEDYFKKIECFDSVEISGVEDRFNASLGTYHDLLKIIKDKDFLDNEENEDILEDIVLTLTLFEDREMIEERLKTYAHLFDDKVMKQLKRRRYTGWGRLSRKLINGIRDKQSGKTILDFLKSDGFANRNFMQLIHDDSLTFKEDIQKAQVSGQGDSLHEHIANLAGSPAIKKGILQTVKVVDELVKVMGRHKPENIVIEMARENQTTQKGQKNSRERMKRIEEGIKELGSQILKEHPVENTQLQNEKLYLYYLQNGRDMYVDQELDINRLSDYDVDHIVPQSFLKDDSIDNKVLTRSDKNRGKSDNVPSEEVVKKMKNYWRQLLNAKLITQRKFDNLTKAERGGLSELDKAGFIKRQLVETRQITKHVAQILDSRMNTKYDENDKLIREVKVITLKSKLVSDFRKDFQFYKVREINNYHHAHDAYLNAVVGTALIKKYPKLESEFVYGDYKVYDVRKMIAKSEQEIGKATAKYFFYSNIMNFFKTEITLANGEIRKRPLIETNGETGEIVWDKGRDFATVRKVLSMPQVNIVKKTEVQTGGFSKESILPKRNSDKLIARKKDWDPKKYGGFDSPTVAYSVLVVAKVEKGKSKKLKSVKELLGITIMERSSFEKNPIDFLEAKGYKEVKKDLIIKLPKYSLFELENGRKRMLASAGELQKGNELALPSKYVNFLYLASHYEKLKGSPEDNEQKQLFVEQHKHYLDEIIEQISEFSKRVILADANLDKVLSAYNKHRDKPIREQAENIIHLFTLTNLGAPAAFKYFDTTIDRKRYTSTKEVLDATLIHQSITGLYETRIDLSQLGGD

SEQ ID NO: 34 - protein, 345 aa, Sulfolobus islandicus
MEVPLYNIFGDNYIIQVATEAENSTIYNNKVEIDDEELRNVLNLAYKIAKNNEDAAAERRGKAKKKKGEEGETTTSNIILPLSGNDKNPWTETLKCYNFPTTVALSEVFKNFSQVKECEEVSAPSFVKPEFYEFGRSPGMVERTRRVKLEVEPHYLIIAAAGWVLTRLGKAKVSEGDYVGVNVFTPTRGILYSLIQNVNGIVPGIKPETAFGLWIARKVVSSVTNPNVSVVRIYTISDAVGQNPTTINGGFSIDLTKLLEKRYLLSERLEAIARNALSISSNMRERYIVLANYIYEYLTGSKRLEDLLYFANRDLIMNLNSDDGKVRDLKLISAYVNGELIRGEG

SEQ ID NO: 35 - protein, 345 aa, Sulfolobus islandicus
MEVPLYNIFGDNYIIQVATEAENSTIYNNKVEIDDEELRNVLNLAYKIAKNNEDAAAERRGKAKKKKGEEGETTTSNIILPLSGNDKNPWTETLKCYNFPTTVALSEVFKNFSQVKECEEVSAPSFVKPEFYKFGRSPGMVERTRRVKLEVEPHYLIMAAAGWVLTRLGKAKVSEGDYVGVNVFTPTRGILYSLIQNVNGIVPGIKPETAFGLWIARKVVSSVTNPNVSVVSIYTISDAVGQNPTTINGGFSIDLTKLLEKRDLLSERLEAIARNALSISSNMRERYIVLANYIYEYLTGSKRLEDLLYFANRDLIMNLNSDDGKVRDLKLISAYVNGELIRGEG

SEQ ID NO: 36 - protein, 1210 aa, Unknown
  Description of Unknown: uncultured Parcubacteria group bacterium sequence
MSKRHPRISGVKGYRLHAQRLEYTGKSGAMRTIKYPLYSSPSGGRTVPREIVSAINDDYVGLYGLSNFDDLYNAEKRNEEKVYSVLDFWYDCVQYGAVFSYTAPGLLKNVAEVRGGSYELTKTLKGSHLYDELQIDKVIKFLNKKEISRANGSLDKLKKDIIDCFKAEYRERHKDQCNKLADDIKNAKKDAGASLGERQKKLFRDFFGISEQSENDKPSFTNPLNLTCCLLPFDTVNNNRNRGEVLFNKLKEYAQKLDKNEGSLEMWEYIGIGNSGTAFSNFLGEGFLGRLRENKITELKKAMMDITDAWRGQEQEEELEKRLRILAALTIKLREPKFDNHWGGYRSDINGKLSSWLQNYINQTVKIKEDLKGHKKDLKKAKEMINRFGESDTKEEAVVSSLLESIEKIVPDDSADDEKPDIPAIAIYRRFLSDGRLTLNRFVQREDVQEALIKERLEAEKKKKPKKRKKKSDAEDEKETIDFKELFPHLAKPLKLVPNFYGDSKRELYKKYKNAAIYTDALWKAVEKIYKSAFSSSLKNSFFDTDFDKDFFIKRLQKIFSVYRRFNTDKWKPIVKNSFAPYCDIVSLAENEVLYKPKQSRSRKSAAIDKNRVRLPSTENIAKAGIALARELSVAGFDWKDLLKKEEHEEYIDLIELHKTALALLLAVTETQLDISALDFVENGTVKDFMKTRDGNLVLEGRFLEMFSQSIVFSELRGLAGLMSRKEFITRSAIQTMNGKQAELLYIPHEFQSAKITTPKEMSRAFLDLAPAEFATSLEPESLSEKSLLKLKQMRYYPHYFGYELTRTGQGIDGGVAENALRLEKSPVKKREIKCKQYKTLGRGQNKIVLYVRSSYYQTQFLEWFLHRPKNVQTDVAVSGSFLIDEKKVKTRWNYDALTVALEPVSGSERVFVSQPFTIFPEKSAEEEGQRYLGIDIGEYGIAYTALEITGDSAKILDQNFISDPQLKTLREEVKGLKLDQRRGTFAMPSTKIARIRESLVHSLRNRIHHLALKHKAKIVYELEVSRFEEGKQKIKKVYATLKKADVYSEIDADKNLQTTVWGKLAVASEISASYTSQFCGACKKLWRAEMQVDETITTQELIGTVRVIKGGTLIDAIKDFMRPPIFDENDTPFPKYRDFCDKHHISKKMRGNSCLFICPFCRANADADIQASQTIALLRYVKEEKKVEDYFERFRKLKNIKVLGQMKKI

SEQ ID NO: 37 - protein, 1129 aa, Alicyclobacillus acido-terrestris
MAVKSIKVKLRLDDMPEIRAGLWKLHKEVNAGVRYYTEWLSLLRQENLYRRSPNGDGEQECDKTAEECKAELLERLRARQVENGHRGPAGSDDELLQLARQLYELLVPQAIGAKGDAQQIARKFLSPLADKDAVGGLGIAKAGNKPRWVRMREAGEPGWEEEKEKAETRKSADRTADVLRALADFGLKPLMRVYTDSEMSSVEWKPLRKGQAVRTWDRDMFQQAIERMMSWESWNQRVGQEYAKLVEQKNRFEQKNFVGQEHLVHLVNQLQQDMKEASPGLESKEQTAHYVTGRALRGSDKVFEKWGKLAPDAPFDLYDAEIKNVQRRNTRRFGSHDLFAKLAEPEYQALWREDASFLTRYAVYNSILRKLNHAKMFATFTLPDATAHPIWTRFDKLGGNLHQYTFLFNEFGERRHAIRFHKLLKVENGVAREVDDVTVPISMSEQLDNLLPRDPNEPIALYFRDYGAEQHFTGEFGGAKIQCRRDQLAHMHRRRGARDVYLNVSVRVQSQSEARGERRPPYAAVFRLVGDNHRAFVHFDKLSDYLAEHPDDGKLGSEGLLSGLRVMSVDLGLRTSASISVFRVARKDELKPNSKGRVPFFFPIKGNDNLVAVHERSQLLKLPGETESKDLRAIREERQRTLRQLRTQLAYLRLLVRCGSEDVGRRERSWAKLIEQPVDAANHMTPDWREAFENELQKLKSLHGICSDKEWMDAVYESVRRVWRHMGKQVRDWRKDVRSGERPKIRGYAKDVVGGNSIEQIEYLERQYKFLKSWSFFGKVSGQVIRAEKGSRFAITLREHIDHAKEDRLKKLADRIIMEALGYVYALDERGKGKWVAKYPPCQLILLEELSEYQFNNDRPPSENNQLMQWSHRGVFQELINQAQVHDLLVGTMYAAFSSRFDARTGAPGIRCRRVPARCTQEHNPEPFPWWLNKFVVEHTLDACPLRADDLIPTGEGEIFVSPFSAEEGDFHQIHADLNAAQNLQQRLWSDFDISQIRLRCDWGEVDGELVLIPRLTGKRTADSYSNKVFYTNTGVTYYERERGKKRRKVFAQEKLSEEEAELLVEADEAREKSVVLMRDPSGIINRGNWTRQKEFWSMVNQRIEGYLVKQIRSRVPLQDSACENTGDI

SEQ ID NO: 38 - protein, 1129 aa, Alicyclobacillus acidiphilus
MAVKSMKVKLRLDNMPEIRAGLWKLHTEVNAGVRYYTEWLSLLRQENLYRRSPNGDGEQECYKTAEECKAELLERLRARQVENGHCGPAGSDDELLQLARQLYELLVPQAIGAKGDAQQIARKFLSPLADKDAVGGLGIAKAGNKPRWVRMREAGEPGWEEEKAKAEARKSTDRTADVLRALADFGLKPLMRVYTDSDMSSVQWKPLRKGQAVRTWDRDMFQQAIERMMSWESWNQRVGEAYAKLVEQKSRFEQKNFVGQEHLVQLVNQLQQDMKEASHGLESKEQTAHYLTGRALRGSDKVFEKWEKLDPDAPFDLYDTEIKNVQRRNTRRFGSHDLFAKLAEPKYQALWREDASFLTRYAVYNSIVRKLNHAKMFATFTLPDATAHPIWTRFDKLGGNLHQYTFLFNEFGEGRHAIRFQKLLTVEDGVAKEVDDVTVPISMSAQLDDLLPRDPHELVALYFQDYGAEQHLAGEFGGAKIQYRRDQLNHLHARRGARDVYLNLSVRVQSQSEARGERRPPYAAVFRLVGDNHRAFVHFDKLSDYLAEHPDDGKLGSEGLLSGLRVMSVDLGLRTSASISVFRVARKDELKPNSEGRVPFCFPIEGNENLVAVHERSQLLKLPGETESKDLRAIREERQRTLRQLRTQLAYLRLLVRCGSEDVGRRERSWAKLIEQPMDANQMTPDWREAFEDELQKLKSLYGICGDREWTEAVYESVRRVWRHMGKQVRDWRKDVRSGERPKIRGYQKDVVGGNSIEQIEYLERQYKFLKSWSFFGKVSGQVIRAEKGSRFAITLREHIDHAKEDRLKKLADRIIMEALGYVYALDDERGKGKWVAKYPPCQLILLEELSEYQFNNDRPPSENNQLMQWSHRGVFQELLNQAQVHDLLVGTMYAAFSSRFDARTGAPGIRCRRVPARCAREQNPEPFPWWLNKFVAEHKLDGCPLRADDLIPTGEGEFFVSPFSAEEGDFHQIHADLNAAQNLQRRLWSDFDISQIRLRCDWGEVDGEPVLIPRTTGKRTADSYGNKVFYTKTGVTYYERERGKKRRKVFAQEELSEEEAELLVEADEAREKSVVLMRDPSGIINRGDWTRQKEFWSMVNQRIEGYLVKQIRSRVRLQESACENTGDI

SEQ ID NO: 39 - protein, 1140 aa, Bacillus hisashii
MAPKKKRKVGIHGVPAAATRSFILKIEPNEEVKKGLWKTHEVLNHGIAYYMNILKLIRQEAIYEHHEQDPKNPKKVSKAEIQAELWDFVLKMQKCNSFTHEVDKDEVFNILRELYEELVPSSVEKKGEANQLSNKFLYPLVDPNSQSGKGTASSGRKPRWYNLKIAGDPSWEEEKKKWEEDKKKDPLAKILGKLAEYGLIPLFIPYTDSNEPIVKEIKWMEKSRNQSVRRLDKDMFIQALERFLSWESWNLKVKEEYEKVEKEYKTLEERIKEDIQALKALEQYEKERQEQLLRDTLNTNEYRLSKRGLRGWREIIQKWLKMDENEPSEKYLEVFKDYQRKHPREAGDYSVYEFLSKKENHFIWRNHPEYPYLYATFCEIDKKKKDAKQQATFTLADPINHPLWVRFEERSGSNLNKYRILTEQLHTEKLKKKLTVQLDRLIYPTESGGWEEKGKVDIVLLPSRQFYNQIFLDIEEKGKHAFTYKDESIKFPLKGTLGGARVQFDRDHLRRYPHKVESGNVGRIYFNMTVNIEPTESPVSKSLKIHRDDFPKVVNFKPKELTEWIKDSKGKKLKSGIESLEIGLRVMSIDLGQRQAAAASIFEVVDQKPDIEGKLFFPIKGTELYAVHRASFNIKLPGETLVKSREVLRKAREDNLKLMNQKLNFLRNVLHFQQFEDITEREKRVTKWISRQENSDVPLVYQDELIQIRELMYKPYKDWVAFLKQLHKRLEVEIGKEVKHWRKSLSDGRKGLYGISLKNIDEIDRTRKFLLRWSLRPTEPGEVRRLEPGQRFAIDQLNHLNALKEDRLKKMANTIIMHALGYCYDVRKKKWQAKNPACQIILFEDLSNYNPYEERSRFENSKLMKWSRREIPRQVALQGEIYGLQVGEVGAQFSSRFHAKTGSPGIRCSVVTKEKLQDNRFFKNLQREGRLTLDKIAVLKEGDLYPDKGGEKFISLSKDRKCVTTHADINAAQNLQKRFWTRTHGFYKVYCKAYQVDGQTVYIPESKDQKQKIIEEFGEGYFILKDGVYEWVNAGKLKIKKGSSKQSSSELVDSDILKDSFDLASELKGEKLMLYRDPSGNVFPSDKWMAAGVFFGKLERILISKLTNQYSISTIEDDSSKQSMKRPAATKKAGQAKKKK

SEQ ID NO: 40 - protein, 1112 aa, Bacillus sp.
MAIRSIKLKMKTNSGTDSIYLRKALWRTHQLINEGIAYYMNLLTLYRQEAIGDKTKEAYQAELINIIRNQQRNNGSSEEHGSDQEILALLRQLYELIIPSSIGESGDANQLGNKFLYPLVDPNSQSGKGTSNAGRKPRWKRLKEEGNPDWELEKKKDEERKAKDPTVKIFDNLNKYGLLPLFPLFTNIQKDIEWLPLGKRQSVRKWDKDMFIQAIERLLSWESWNRRVADEYKQLKEKTESYYKEHLTGGEEWIEKIRKFEKERNMELEKNAFAPNDGYFITSRQIRGWDRVYEKWSKLPESASPEELWKVVAEQQNKMSEGFGDPKVFSFLANRENRDIWRGHSERIYHIAAYNGLQKKLSRTKEQATFTLPDAIEHPLWIRYESPGGTNLNLFKLEEKQKKNYYVTLSKIIWPSEEKWIEKENIEIPLAPSIQFNRQIKLKQHVKGKQEISFSDYSSRISLDGVLGGSRIQFNRKYIKNHKELLGEGDIGPVFFNLVVDVAPLQETRNGRLQSPIGKALKVISSDFSKVIDYKPKELMDWMNTGSASNSFGVASLLEGMRVMSIDMGQRTSASVSIFEVVKELPKDQEQKLFYSINDTELFAIHKRSFLLNLPGEVVTKNNKQQRQERRKKRQFVRSQIRMLANVLRLETKKTPDERKKAIHKLMEIVQSYDSWTASQKEVWEKELNLLTNMAAFNDEIWKESLVELHHRIEPYVGQIVSKWRKGLSEGRKNLAGISMWNIDELEDTRRLLISWSKRSRTPGEANRIETDEPFGSSLLQHIQNVKDDRLKQMANLIIMTALGFKYDKEEKDRYKRWKETYPACQIILFENLNRYLFNLDRSRRENSRLMKWAHRSIPRTVSMQGEMFGLQVGDVRSEYSSRFHAKTGAPGIRCHALTEEDLKAGSNTLKRLIEDGFINESELAYLKKGDIIPSQGGELFVTLSKRYKKDSDNNELTVIHADINAAQNLQKRFWQQNSEVYRVPCQLARMGEDKLYIPKSQTETIKKYFGKGSFVKNNTEQEVYKWEKSEKMKIKTDTTFDLQDLDGFEDISKTIELAQEQQKKYLTMFRDPSGYFFNNETWRPQKEYWSIVNNIIKSCLKKKILSNKVEL

SEQ ID NO: 41 - protein, 982 aa, Homo sapiens [sequence omitted]

SEQ ID NO: 42 - DNA, 2949 bp, Homo sapiens
atggcaaactcaatgaatggcagaaaccctggtggtcgaggaggaaatccccgaaaaggtcgaattttgggtattattgatgctattcaggatgcagttggaccccctaagcaagctgccgcagatcgcaggaccgtggagaagacttggaagctcatggacaaagtggtaagactgtgccaaaatcccaaacttcagttgaaaaatagcccaccatatatacttgatattttgcctgatacatatcagcatttacgacttatattgagtaaatatgatgacaaccagaaacttgcccaactcagtgagaatgagtactttaaaatctacattgatagccttatgaaaaagtcaaaacgggcaataagactctttaaagaaggcaaggagagaatgtatgaagaacagtcacaggacagacgaaatctcacaaaactgtcccttatcttcagtcacatgctggcagaaatcaaagcaatctttcccaatggtcaattccagggagataactttcgtatcacaaaagcagatgctgctgaattctggagaaagttttttggagacaaaactatcgtaccatggaaagtattcagacagtgccttcatgaggtccaccagattagctctggcctggaagcaatggctctaaaatcaacaattgatttaacttgcaatgattacatttcagtttttgaatttgatatttttaccaggctgtttcagccttggggctctattttgcggaattggaatttcttagctgtgacacatccaggttacatggcatttctcacatatgatgaagttaaagcacgactacagaaatatagcaccaaacccggaagctatattttccggttaagttgcactcgattgggacagtgggccattggctatgtgactggggatgggaatatcttacagaccatacctcataacaagcccttatttcaagccctgattgatggcagcagggaaggattttatctttatcctgatgggaggagttataatcctgatttaactggattatgtgaacctacacctcatgaccatataaaagttacacaggaacaatatgaattatattgtgaaatgggctccacttttcagctctgtaagatttgtgcagagaatgacaaagatgtcaagattgagccttgtgggcatttgatgtgcacctcttgccttacggcatggcaggagtcggatggtcagggctgccctttctgtcgttgtgaaataaaaggaactgagcccataatcgtggacccctttgatccaagagatgaaggctccaggtgttgcagcatcattgacccctttggcatgccgatgctagacttggacgacgatgatgatcgtgaggagtccttgatgatgaatcggttggcaaacgtccgaaagtgcactgacaggcagaactcaccagtcacatcaccaggatcctctccccttgcccagagaagaaagccacagcctgacccactccagatcccacatctaagcctgccacccgtgcctcctcgcctggatctaattcagaaaggcatagttagatctccctgtggcagcccaacgggttcaccaaagtcttctccttgcatggtgagaaaacaagataaaccactcccagcaccacctcctcccttaagagatcctcctccaccgccacctgaaagacctccaccaatcccaccagacaatagactgagtagacacatccatcatgtggaaagcgtgccttccagagacccgccaatgcctcttgaagcatggtgccctcgggatgtgtttgggactaatcagcttgtgggatgtcgactcctaggggagggctctccaaaacctggaatcacagcgagttcaaatgtcaatggaaggcacagtagagtgggctctgacccagtgcttatgcggaaacacagacgccatgatttgcctttagaaggagctaaggtcttttccaatggtcaccttggaagtgaagaatatgatgttcctccccggctttctcctcctcctccagttaccaccctcctccctagcataaagtgtactggtccgttagcaaattctctttcagagaaaacaagagacccagtagaggaagatgatgatgaatacaagattccttcatcccaccctgtttccctgaattcacaaccatctcattgtcataatgtaaaacctcctgttcggtcttgtgataatggtcactgtatgctgaatggaacacatggtccatcttcagagaagaaatcaaacatccctgacttaagcatatatttaaagggagatgtttttgattcagcctctgatcccgtgccattaccacctgccaggcctccaactcgggacaatccaaagcatggttcttcactcaacaggacgccctctgattatgatcttctcatccctccattaggtgaagatgcttttgatgccctccctccatctctcccacctcccccacctcctgcaaggcatagtctcattgaacattcaaaacctcctggctccagtagccggccatcctcaggacaggatctttttcttcttccttcagatccctttgttgatctagcaagtggccaagttcctttgcctcctgctagaaggttaccaggtgaaaatgtcaaaactaacagaacatcacaggactatgatcagcttccttcatgttcagatggttcacaggcaccagccagaccccctaaaccacgaccgcgcaggactgcaccagaaattcaccacagaaaaccccatgggcctgaggcggcattggaaaatgtcgatgcaaaaattgcaaaactcatgggagagggttatgcctttgaagaggtgaagagagccttagagatagcccagaataatgtcgaagttgcccggagcatcctccgagaatttgccttccctcctccagtatccccacgtctaaatctatag

SEQ ID NO: 43 - protein, 377 aa, Homo sapiens
MSFPCKFVASFLLIFNVSSKGAVSKEITNALETWGALGQDINLDIPSFQMSDDIDDIKWEKTSDKKKIAQFRKEKETFKEKDTYKLFKNGTLKIKHLKTDDQDIYKVSIYDTKGKNVLEKIFDLKIQERVSKPKISWTCINTTLTCEVMNGTDPELNLYQDGKHLKLSQRVITHKWTTSLSAKFKCTAGNKVSKESSVEPVSCPGGSILGQSNGLSAWTPPSHPTSLPFAEKGLDIYLIIGICGGGSLLMVFVALLVFYITKRKKQRSRRNDEELETRAHRVATEERGRKPHQIPASTPQNPATSQHPPPPPGHRSQAPSHRPPPPGHRVQHQPQKRPPAPSGTQVHQQKGPPLPRPRVQPKPPHGAAENSLSPSSN

SEQ ID NO: 44 - DNA, 1643 bp, Homo sapiens
agtctcacttcagttccttttgcatgaagagctcagaatcaaaagaggaaaccaacccctaagatgagctttccatgtaaatttgtagccagcttccttctgattttcaatgtttcttccaaaggtgcagtctccaaagagattacgaatgccttggaaacctggggtgccttgggtcaggacatcaacttggacattcctagttttcaaatgagtgatgatattgacgatataaaatgggaaaaaacttcagacaagaaaaagattgcacaattcagaaaagagaaagagactttcaaggaaaaagatacatataagctatttaaaaatggaactctgaaaattaagcatctgaagaccgatgatcaggatatctacaaggtatcaatatatgatacaaaaggaaaaaatgtgttggaaaaaatatttgatttgaagattcaagagagggtctcaaaaccaaagatctcctggacttgtatcaacacaaccctgacctgtgaggtaatgaatggaactgaccccgaattaaacctgtatcaagatgggaaacatctaaaactttctcagagggtcatcacacacaagtggaccaccagcctgagtgcaaaattcaagtgcacagcagggaacaaagtcagcaaggaatccagtgtcgagcctgtcagctgtccaggaggcagcatccttggccagagtaatgggctctctgcctggacccctcccagccatcccacttctcttccttttgcagagaaaggtctggacatctatctcatcattggcatatgtggaggaggcagcctcttgatggtctttgtggcactgctcgttttctatatcaccaaaaggaaaaaacagaggagtcggagaaatgatgaggagctggagacaagagcccacagagtagctactgaagaaaggggccggaagccccaccaaattccagcttcaacccctcagaatccagcaacttcccaacatcctcctccaccacctggtcatcgttcccaggcacctagtcatcgtcccccgcctcctggacaccgtgttcagcaccagcctcagaagaggcctcctgctccgtcgggcacacaagttcaccagcagaaaggcccgcccctccccagacctcgagttcagccaaaacctccccatggggcagcagaaaactcattgtccccttcctctaattaaaaaagatagaaactgtctttttcaataaaaagcactgtggatttctgccctcctgatgtgcatatccgtacttccatgaggtgttttctgtgtgcagaacattgtcacctcctgaggctgtgggccacagccacctctgcatcttcgaactcagccatgtggtcaacatctggagtttttggtctcctcagagagctccatcacaccagtaaggagaagcaatataagtgtgattgcaagaatggtagaggaccgagcacagaaatcttagagatttcttgtcccctctcaggtcatgtgtagatgcgataaatcaagtgattggtgtgcctgggtctcactacaagcagcctatctgcttaagagactctggagtttcttatgtgccctggtggacacttgcccaccatcctgtgagtaaaagtgaaataaaagctttgactaga

SEQ ID NO: 45 - protein, 207 aa, Homo sapiens
MQSGTHWRVLGLCLLSVGVWGQDGNEEMGGITQTPYKVSISGTTVILTCPQYPGSEILWQHNDKNIGGDEDDKNIGSDEDHLSLKEFSELEQSGYYVCYPRGSKPEDANFYLYLRARVCENCMEMDVMSVATIVIVDICITGGLLLLVYYWSKNRKAKAKPVTRGAGAGGRQRGQNKERPPPVPNPDYEPIRKGQRDLYSGLNQRRI

SEQ ID NO: 46 - DNA, 1361 bp, Homo sapiens
agaaaccctcctcccctcccagcctcaggtgcctgcttcagaaaatgaagtagtaagtctgctggcctccgccatcttagtaaagtaacagtcccatgaaacaaagatgcagtcgggcactcactggagagttctgggcctctgcctcttatcagttggcgtttgggggcaagatggtaatgaagaaatgggtggtattacacagacaccatataaagtctccatctctggaaccacagtaatattgacatgccctcagtatcctggatctgaaatactatggcaacacaatgataaaaacataggcggtgatgaggatgataaaaacataggcagtgatgaggatcacctgtcactgaaggaattttcagaattggagcaaagtggttattatgtctgctaccccagaggaagcaaaccagaagatgcgaacttttatctctacctgagggcaagagtgtgtgagaactgcatggagatggatgtgatgtcggtggccacaattgtcatagtggacatctgcatcactgggggcttgctgctgctggtttactactggagcaagaatagaaaggccaaggccaagcctgtgacacgaggagcgggtgctggcggcaggcaaaggggacaaaacaaggagaggccaccacctgttcccaacccagactatgagcccatccggaaaggccagcgggacctgtattctggcctgaatcagagacgcatctgaccctctggagaacactgcctcccgctggcccaggtctcctctccagtccccctgcgactccctgtttcctgggctagtcttggaccccacgagagagaatcgttcctcagcctcatggtgaactcgcgccctccagcctgatcccccgctccctcctccctgccttctctgctggtacccagtcctaaaatattgctgcttcctcttcctttgaagcatcatcagtagtcacaccctcacagctggcctgccctcttgccaggatatttatttgtgctattcactcccttccctttggatgtaacttctccgttcagttccctccttttcttgcatgtaagttgtcccccatcccaaagtattccatctacttttctatcgccgtccccttttgcagccctctctggggatggactgggtaaatgttgacagaggccctgccccgttcacagatcctggccctgagccagccctgtgctcctccctcccccaacactccctaccaaccccctaatcccctactccctccaccccccctccactgtaggccactggatggtcatttgcatctccgtaaatgtgctctgctcctcagctgagagagaaaaaaataaactgtatttggctgcaa

SEQ ID NO: 47 - protein, 182 aa, Homo sapiens
MEQGKGLAVLILAIILLQGTLAQSIKGNHLVKVYDYQEDGSVLLTCDAEAKNITWFKDGKMIGFLTEDKKKWNLGSNAKDPRGMYQCKGSQNKSKPLQVYYRMCQNCIELNAATISGFLFAEIVSIFVLAVGVYFIAGQDGVRQSRASDKQTLLPNDQLYQPLKDREDDQYSHLQGNQLRRN

SEQ ID NO: 48 - DNA, 2690 bp, Homo sapiens
agtctagctgctgcacaggctggctggctggctggctgctaagggctgctccacgcttttgccggaggacagagactgacatggaacaggggaagggcctggctgtcctcatcctggctatcattcttcttcaaggtactttggcccagtcaatcaaaggaaaccacttggttaaggtgtatgactatcaagaagatggttcggtacttctgacttgtgatgcagaagccaaaaatatcacatggtttaaagatgggaagatgatcggcttcctaactgaagataaaaaaaaatggaatctgggaagtaatgccaaggaccctcgagggatgtatcagtgtaaaggatcacagaacaagtcaaaaccactccaagtgtattacagaatgtgtcagaactgcattgaactaaatgcagccaccatatctggctttctctttgctgaaatcgtcagcattttcgtccttgctgttggggtctacttcattgctggacaggatggagttcgccagtcgagagcttcagacaagcagactctgttgcccaatgaccagctctaccagcccctcaaggatcgagaagatgaccagtacagccaccttcaaggaaaccagttgaggaggaattgaactcaggactcagagtagtccaggtgttctcctcctattcagttcccagaatcaaagcaatgcattttggaaagctcctagcagagagactttcagccctaaatctagactcaaggttcccagagatgacaaatggagaagaaaggccatcagagcaaatttgggggtttctcaaataaaataaaaataaaaacaaatactgtgtttcagaagcgccacctattggggaaaattgtaaaagaaaaatgaaaagatcaaataaccccctggatttgaatataattttttgtgttgtaatttttatttcgtttttgtataggttataattcacatggctcaaatattcagtgaaagctctccctccaccgccatcccctgctacccagtgaccctgttgccctcttcagagacaaattagtttctcttttttttttttttttttttttttttgagacagtctggctctgtcacccaggctgaaatgcagtggcaccatctcggctcactgcaacctctgcctcctgggttcaagcgattctcctgcctcagcctcccgggcagctgggattacaggcacacactaccacacctggctaatttttgtatttttagtagagacagggttttgctctgttggccaagctggtctcgaactcctgacctcaagtgatccgcccgcctcagcctcccaaagtgctgggattacaggtgtgagccaccatgcctggtcttaaaaccagtttcttatatatctctctggaggtattctaggcatatatgagcacattctcaagtacatattatcctcccttcccctatcttttagacaaatgatatcaaactatacatcttgtgagattattgcataccattatatgaagataccattatatcctttttaatgcaaccatattgtacaaatagactatgatttatttaacctgttatctatcagtggatatttaagttggtagttggttccaatcttttgctcttacaacaattctgcaatgactaacattgtataaatatcatttttaaaaataattgcattgaagcataatgtacatgccataaaatccacccatcttaagtgatttcacctgttctcagaaatttttagtaaatttaactaattgtacagccattaccataatccagctttaggacattttcttttttttcttttcttttcttttttttcttttttttttttttttgaagtggaatcttgctctgtggcccaggctggagtgcagtggcgcgatctcagctcactgcaacctccacctcctgggttcaagcgattctcttgccttggcctcccgagtagctgagactacaggcacatgccaccacgcccagctcattttttgtgtatttagtatttgtgtatctagtatttgtgtacttagtagagacagggtttcaccatgttggccaggctggtctccaattcctgacctcaggcgatccacccgccttgacctcccaaagtgctgggattacaggtgtgagccaccgcgccaggcccgtaactgtattttaatatagccattctatggatttaatatggtattttattatggccttaatttgcatttccctagatactaaccatgctgagtgtcctgtcttgtgtttattaaccattcatatatttttagtgaaatgtgtatcaaatcttttgcccatttttaagttgacttatttgtttgtcttcttactattgggttgcatatgtttttgatataagtcctttatcagatatatgatttggaaatattttctaccaatctgtggtttgtttttcttaatggtgtcttttgaagtgcaaaaggtttgaattttgaagtacattttattgattttttcttctatatattgtgcttttggtatcatgtctaataaatctttaccaaacccacagttacaaagattttctcctgtcttctttttatactttttacagctttatggttttagctctaacaataaatgtgattttgaacatacataagactatttgtaacaaacacaaataaattgaattgttgggca

SEQ ID NO: 49 - protein, 171 aa, Homo sapiens
MEHSTFLSGLVLATLLSQVSPFKIPIEELEDRVFVNCNTSITWVEGTVGTLLSDITRLDLGKRILDPRGIYRCNGTDIYKDKESTVQVHYRMCQSCVELDPATVAGIIVTDVIATLLLALGVFCFAGHETGRLSGAADTQALLRNDQVYQPLRDRDDAQYSHLGGNWARNK

SEQ ID NO: 50 - DNA, 771 bp, Homo sapiens
agagaagcagacatcttctagttcctcccccactctcctctttccggtacctgtgagtcagctaggggagggcagctctcacccaggctgatagttcggtgacctggctttatctactggatgagttccgctgggagatggaacatagcacgtttctctctggcctggtactggctacccttctctcgcaagtgagccccttcaagatacctatagaggaacttgaggacagagtgtttgtgaattgcaataccagcatcacatgggtagagggaacggtgggaacactgctctcagacattacaagactggacctgggaaaacgcatcctggacccacgaggaatatataggtgtaatgggacagatatatacaaggacaaagaatctaccgtgcaagttcattatcgaatgtgccagagctgtgtggagctggatccagccaccgtggctggcatcattgtcactgatgtcattgccactctgctccttgctttgggagtcttctgctttgctggacatgagactggaaggctgtctggggctgccgacacacaagctctgttgaggaatgaccaggtctatcagcccctccgagatcgagatgatgctcagtacagccaccttggaggaaactgggctcggaacaagtgaacctgagactggtggcttctagaagcagccattaccaactgtaccttcccttcttgctcagccaataaatatatcctctttcactcagaaaaaaaaaaaaaaaaaaaaaaaaaaaaaa

SEQ ID NO: 51 - protein, 458 aa, Homo sapiens
MNRGVPFRHLLLVLQLALLPAATQGKKVVLGKKGDTVELTCTASQKKSIQFHWKNSNQIKILGNQGSFLTKGPSKLNDRADSRRSLWDQGNFPLIIKNLKIEDSDTYICEVEDQKEEVQLLVFGLTANSDTHLLQGQSLTLTLESPPGSSPSVQCRSPRGKNIQGGKTLSVSQLELQDSGTWTCTVLQNQKKVEFKIDIVVLAFQKASSIVYKKEGEQVEFSFPLAFTVEKLTGSGELWWQAERASSSKSWITFDLKNKEVSVKRVTQDPKLQMGKKLPLHLTLPQALPQYAGSGNLTLALEAKTGKLHQEVNLVVMRATQLQKNLTCEVWGPTSPKLMLSLKLENKEAKVSKREKAVWVLNPEAGMWQCLLSDSGQVLLESNIKVLPTWSTPVQPMALIVLGGVAGLLLFIGLGIFFCVRCRHRRRQAERMSQIKRLLSEKKTCQCPHRFQKTCSPI

SEQ ID NO: 52 - DNA, 3049 bp, Homo sapiens
ctctcttcatttaagcacgactctgcagaaggaacaaagcaccctccccactgggctcctggttgcagagctccaagtcctcacacagatacgcctgtttgagaagcagcgggcaagaaagacgcaagcccagaggccctgccatttctgtgggctcaggtccctactggctcaggcccctgcctccctcggcaaggccacaatgaaccggggagtcccttttaggcacttgcttctggtgctgcaactggcgctcctcccagcagccactcagggaaagaaagtggtgctgggcaaaaaaggggatacagtggaactgacctgtacagcttcccagaagaagagcatacaattccactggaaaaactccaaccagataaagattctgggaaatcagggctccttcttaactaaaggtccatccaagctgaatgatcgcgctgactcaagaagaagcctttgggaccaaggaaactttcccctgatcatcaagaatcttaagatagaagactcagatacttacatctgtgaagtggaggaccagaaggaggaggtgcaattgctagtgttcggattgactgccaactctgacacccacctgcttcaggggcagagcctgaccctgaccttggagagcccccctggtagtagcccctcagtgcaatgtaggagtccaaggggtaaaaacatacagggggggaagaccctctccgtgtctcagctggagctccaggatagtggcacctggacatgcactgtcttgcagaaccagaagaaggtggagttcaaaatagacatcgtggtgctagctttccagaaggcctccagcatagtctataagaaagagggggaacaggtggagttctccttcccactcgcctttacagttgaaaagctgacgggcagtggcgagctgtggtggcaggcggagagggcttcctcctccaagtcttggatcacctttgacctgaagaacaaggaagtgtctgtaaaacgggttacccaggaccctaagctccagatgggcaagaagctcccgctccacctcaccctgccccaggccttgcctcagtatgctggctctggaaacctcaccctggcccttgaagcgaaaacaggaaagttgcatcaggaagtgaacctggtggtgatgagagccactcagctccagaaaaatttgacctgtgaggtgtggggacccacctcccctaagctgatgctgagtttgaaactggagaacaaggaggcaaaggtctcgaagcgggagaaggcggtgtgggtgctgaaccctgaggcggggatgtggcagtgtctgctgagtgactcgggacaggtcctgctggaatccaacatcaaggttctgcccacatggtccaccccggtgcagccaatggccctgattgtgctggggggcgtcgccggcctcctgcttttcattgggctaggcatcttcttctgtgtcaggtgccggcaccgaaggcgccaagcagagcggatgtctcagatcaagagactcctcagtgagaagaagacctgccagtgtcctcaccggtttcagaagacatgtagccccatttgaggcacgaggccaggcagatcccacttgcagcctccccaggtgtctgccccgcgtttcctgcctgcggaccagatgaatgtagcagatccccagcctctggcctcctgttcgcctcctctacaatttgccattgtttctcctgggttaggccccggcttcactggttgagtgttgctctctagtttccagaggcttaatcacaccgtcctccacgccatttccttttccttcaagcctagcccttctctcattatttctctctgaccctctccccactgctcatttggatcccaggggagtgttcagggccagccctggctggcatggagggtgaggctgggtgtctggaagcatggagcatgggactgttcttttacaagacaggaccctgggaccacagagggcaggaacttgcacaaaatcacacagccaagccagtcaaggatggatgcagatccagaggtttctggcagccagtacctcctgccccatgctgcccgcttctcaccctatgtgggtgggaccacagactcacatcctgaccttgcacaaacagcccctctggacacagccccatgtacacggcctcaagggatgtctcacatcctctgtctatttgagacttagaaaaatcctacaaggctggcagtgacagaactaagatgatcatctccagtttatagaccagaaccagagctcagagaggctagatgattgattaccaagtgccggactagcaagtgctggagtcgggactaacccaggtcccttgtcccaagttccactgctgcctcttgaatgcagggacaaatgccacacggctctcaccagtggctagtggtgggtactcaatgtgtacttttgggttcacagaagcacagcacccatgggaagggtccatctcagagaatttacgagcagggatgaaggcctccctgtctaaaatccctccttcatcccccgctggtggcagaatctgttaccagaggacaaagcctttggctcttctaatcagagcgcaagctgggagcacaggcactgcaggagagaatgcccagtgaccagtcactgaccctgtgcagaacctcctggaagcgagctttgctgggagagggggtagctagcctgagagggaaccctctaagggacctcaaaggtgattgtgccaggctctgcgcctgccccacaccctcccttaccctcctccagaccattcaggacacagggaaatcagggttacaaatcttcttgatccacttctctcaggatcccctctcttcctacccttcctcaccacttccctcagtcccaactccttttccctatttccttctcctcctgtctttaaagcctgcctcttccaggaagacccccctattgctgctggggctccccatttgcttactttgcatttgtgcccactctccacccctgctcccctgagctgaaataaaaatacaataaacttac

SEQ ID NO: 53 - protein, 438 aa, Homo sapiens
MVCSQSWGRSSKQWEDPSQASKVCQRLNCGVPLSLGPFLVTYTPQSSIICYGQLGSFSNCSHSRNDMCHSLGLTCLEPQKTTPPTTRPPPTTTPEPTAPPRLQLVAQSGGQHCAGVVEFYSGSLGGTISYEAQDKTQDLENFLCNNLQCGSFLKHLPETEAGRAQDPGEPREHQPLPIQWKIQNSSCTSLEHCFRKIKPQKSGRVLALLCSGFQPKVQSRLVGGSSICEGTVEVRQGAQWAALCDSSSARSSLRWEEVCREQQCGSVNSYRVLDAGDPTSRGLFCPHQKLSQCHELWERNSYCKKVFVTCQDPNPAGLAAGTVASIILALVLLVVLLVVCGPLAYKKLVKKFRQKKQRQWIGPTGMNQNMSFHRNHTATVRSHAENPTASHVDNEYSQPPRNSHLSAYPALEGALHRSSMQPDNSSDSDYDLHGAQRL

SEQ ID NO: 54 - DNA, 3376 bp, Homo sapiens
gagtcttgctgatgctcccggctgaataaaccccttccttctttaacttggtgtctgaggggttttgtctgtggcttgtcctgctacatttcttggttccctgaccaggaagcaaagtgattaacggacagttgaggcagccccttaggcagcttaggcctgccttgtggagcatccccgcggggaactctggccagcttgagcgacacggatcctcagagcgctcccaggtaggcaattgccccagtggaatgcctcgtcagagcagtgcatggcaggcccctgtggaggatcaacgcagtggctgaacacagggaaggaactggcacttggagtccggacaactgaaacttgtcgcttcctgcctcggacggctcagctggtatgacccagatttccaggcaaggctcacccgttccaactcgaagtgccagggccagctggaggtctacctcaaggacggatggcacatggtttgcagccagagctggggccggagctccaagcagtgggaggaccccagtcaagcgtcaaaagtctgccagcggctgaactgtggggtgcccttaagccttggccccttccttgtcacctacacacctcagagctcaatcatctgctacggacaactgggctccttctccaactgcagccacagcagaaatgacatgtgtcactctctgggcctgacctgcttagaaccccagaagacaacacctccaacgacaaggcccccgcccaccacaactccagagcccacagctcctcccaggctgcagctggtggcacagtctggcggccagcactgtgccggcgtggtggagttctacagcggcagcctggggggtaccatcagctatgaggcccaggacaagacccaggacctggagaacttcctctgcaacaacctccagtgtggctccttcttgaagcatctgccagagactgaggcaggcagagcccaagacccaggggagccacgggaacaccagcccttgccaatccaatggaagatccagaactcaagctgtacctccctggagcattgcttcaggaaaatcaagccccagaaaagtggccgagttcttgccctcctttgctcaggtttccagcccaaggtgcagagccgtctggtggggggcagcagcatctgtgaaggcaccgtggaggtgcgccagggggctcagtgggcagccctgtgtgacagctcttcagccaggagctcgctgcggtgggaggaggtgtgccgggagcagcagtgtggcagcgtcaactcctatcgagtgctggacgctggtgacccaacatcccgggggctcttctgtccccatcagaagctgtcccagtgccacgaactttgggagagaaattcctactgcaagaaggtgtttgtcacatgccaggatccaaaccccgcaggcctggccgcaggcacggtggcaagcatcatcctggccctggtgctcctggtggtgctgctggtcgtgtgcggcccccttgcctacaagaagctagtgaagaaattccgccagaagaagcagcgccagtggattggcccaacgggaatgaaccaaaacatgtctttccatcgcaaccacacggcaaccgtccgatcccatgctgagaaccccacagcctcccacgtggataacgaatacagccaacctcccaggaactcccacctgtcagcttatccagctctggaaggggctctgcatcgctcctccatgcagcctgacaactcctccgacagtgactatgatctgcatggggctcagaggctgtaaagaactgggatccatgagcaaaaagccgagagccagacctgtttgtcctgagaaaactgtccgctcttcacttgaaatcatgtccctatttctaccccggccagaacatggacagaggccagaagccttccggacaggcgctgctgccccgagtggcaggccagctcacactctgctgcacaacagctcggccgcccctccacttgtggaagctgtggtgggcagagccccaaaacaagcagccttccaactagagactcgggggtgtctgaagggggccccctttccctgcccgctggggagcggcgtctcagtgaaatcggctttctcctcagactctgtccctggtaaggagtgacaaggaagctcacagctgggcgagtgcattttgaatagttttttgtaagtagtgcttttcctccttcctgacaaatcgagcgctttggcctcttctgtgcagcatccacccctgcggatccctctggggaggacaggaaggggactcccggagacctctgcagccgtggtggtcagaggctgctcacctgagcacaaagacagctctgcacattcaccgcagctgccagccaggggtctgggtgggcaccaccctgacccacagcgtcaccccactccctctgtcttatgactcccctccccaaccccctcatctaaagacaccttcctttccactggctgtcaagcccacagggcaccagtgccacccagggcccggcacaaaggggcgcctagtaaaccttaaccaacttggttttttgcttcacccagcaattaaaagtcccaagctgaggtagtttcagtccatcacagttcatcttctaacccaagagtcagagatggggctggtcatgttcctttggtttgaataactcccttgacgaaaacagactcctctagtacttggagatcttggacgtacacctaatcccatggggcctcggcttccttaactgcaagtgagaagaggaggtctacccaggagcctcgggtctgatcaagggagaggccaggcgcagctcactgcggcggctccctaagaaggtgaagcaacatgggaacacatcctaagacaggtcctttctccacgccatttgatgctgtatctcctgggagcacaggcatcaatggtccaagccgcataataagtctggaagagcaaaagggagttactaggatatggggtgggctgctcccagaatctgctcagctttctgcccccaccaacaccctccaaccaggccttgccttctgagagcccccgtggccaagcccaggtcacagatcttcccccgaccatgctgggaatccagaaacagggaccccatttgtcttcccatatctggtggaggtgagggggctcctcaaaagggaactgagaggctgctcttagggagggcaaaggttcgggggcagccagtgtctcccatcagtgccttttttaataaaagctctttcatctatagtttggccaccatacagtggcctcaaagcaaccatggcctacttaaaaaccaaaccaaaaataaagagtttagttgaggagaaaaaaaaaaaaaaaaaaaaaaaaa

SEQ ID NO: 55 - protein, 240 aa, Homo sapiens
MAGPPRLLLLPLLLALARGLPGALAAQEVQQSPHCTTVPVGASVNITCSTSGGLRGIYLRQLGPQPQDIIYYEDGVVPTTDRRFRGRIDFSGSQDNLTITMHRLQLSDTGTYTCQAITEVNVYGSGTLVLVTEEQSQGWHRCSDAPPRASALPAPPTGSALPDPQTASALPDPPAASALPAALAVISFLLGLGLGVACVLARTQIKKLCSWRDKNSAACVVYEDMSHSRCNTLSSPNQYQ

SEQ ID NO: 56 - DNA, 1284 bp, Homo sapiens
ctctctgagctctgagcgcctgcggtctcctgtgtgctgctctctgtggggtcctgtagacccagagaggctcagctgcactcgcccggctgggagagctgggtgtggggaacatggccgggcctccgaggctcctgctgctgcccctgcttctggcgctggctcgcggcctgcctggggccctggctgcccaagaggtgcagcagtctccccactgcacgactgtccccgtgggagcctccgtcaacatcacctgctccaccagcgggggcctgcgtgggatctacctgaggcagctcgggccacagccccaagacatcatttactacgaggacggggtggtgcccactacggacagacggttccggggccgcatcgacttctcagggtcccaggacaacctgactatcaccatgcaccgcctgcagctgtcggacactggcacctacacctgccaggccatcacggaggtcaatgtctacggctccggcaccctggtcctggtgacagaggaacagtcccaaggatggcacagatgctcggacgccccaccaagggcctctgccctccctgccccaccgacaggctccgccctccctgacccgcagacagcctctgccctccctgacccgccagcagcctctgccctccctgcggccctggcggtgatctccttcctcctcgggctgggcctgggggtggcgtgtgtgctggcgaggacacagataaagaaactgtgctcgtggcgggataagaattcggcggcatgtgtggtgtacgaggacatgtcgcacagccgctgcaacacgctgtcctcccccaaccagtaccagtgacccagtgggcccctgcacgtcccgcctgtggtccccccagcaccttccctgccccaccatgccccccaccctgccacacccctcaccctgctgtcctcccacggctgcagcagagtttgaagggcccagccgtgcccagctccaagcagacacacaggcagtggccaggccccacggtgcttctcagtggacaatgatgcctcctccgggaagccttccctgcccagcccacgccgccaccgggaggaagcctgactgtcctttggctgcatctcccgaccatggccaaggagggcttttctgtgggatgggcctgggcacgcggccctctcctgtcagtgccggcccacccaccagcaggcccccaacccccaggcagcccggcagaggacgggaggagaccagtcccccacccagccgtaccagaaataaaggcttctgtgcttcc

SEQ ID NO: 57 - protein, 595 aa, Homo sapiens
MRVLLAALGLLFLGALRAFPQDRPFEDTCHGNPSHYYDKAVRRCCYRCPMGLFPTQQCPQRPTDCRKQCEPDYYLDEADRCTACVTCSRDDLVEKTPCAWNSSRVCECRPGMFCSTSAVNSCARCFFHSVCPAGMIVKFPGTAQKNTVCEPASPGVSPACASPENCKEPSSGTIPQAKPTPVSPATSSASTMPVRGGTRLAQEAASKLTRAPDSPSSVGRPSSDPGLSPTQPCPEGSGDCRKQCEPDYYLDEAGRCTACVSCSRDDLVEKTPCAWNSSRTCECRPGMICATSATNSCARCVPYPICAAETVTKPQDMAEKDTTFEAPPLGTQPDCNPTPENGEAPASTSPTQSLLVDSQASKTLPIPTSAPVALSSTGKPVLDAGPVLFWVILVLVVVVGSSAFLLCHRRACRKRIRQKLHLCYPVQTSQPKLELVDSRPRRSSTQLRSGASVTEPVAEERGLMSQPLMETCHSVGAAYLESLPLQDASPAGGPSSPRDLPEPRVSTEHTNNKIEKIYIMKADTVIVGTVKAELPEGRGLAGPAEPELEEELEADHTPHYPEQETEPPLGSCSDVMLSVEEEGKEDPLPTAASGK

SEQ ID NO: 58 - DNA, 3760 bp, Homo sapiens
ctgagtcatctctgcacgtgtttgcccccttttttcttcgctgcttgtagctaagtgttcctggaaccaatttgatacgggagaactaaggctgaaacctcggaggaacaaccacttttgaagtgacttcgcggcgtgcgttgggtgcggactaggtggccgcggcgggagtgtgctggagcctgaagtccacgcgcgcggctgagaaccgccgggaccgcacgtgggcgccgcgcgcttcccccgcttcccaggtgggcgccggccgccaggccacctcacgtccggccccggggatgcgcgtcctcctcgccgcgctgggactgctgttcctgggggcgctacgagccttcccacaggatcgacccttcgaggacacctgtcatggaaaccccagccactactatgacaaggctgtcaggaggtgctgttaccgctgccccatggggctgttcccgacacagcagtgcccacagaggcctactgactgcaggaagcagtgtgagcctgactactacctggatgaggccgaccgctgtacagcctgcgtgacttgttctcgagacgacctcgtggagaagacgccgtgtgcatggaactcctcccgtgtctgcgaatgtcgacccggcatgttctgttccacgtctgccgtcaactcctgtgcccgctgcttcttccattctgtctgtccggcagggatgattgtcaagttcccaggcacggcgcagaagaacacggtctgtgagccggcttccccaggggtcagccctgcctgtgccagcccagagaactgcaaggaaccctccagtggcaccatcccccaggccaagcccaccccggtgtccccagcaacctccagtgccagcaccatgcctgtaagagggggcacccgcctcgcccaggaagctgcttctaaactgacgagggctcccgactctccctcctctgtgggaaggcctagttcagatccaggtctgtccccaacacagccatgcccagaggggtctggtgattgcagaaagcagtgtgagcccgactactacctggacgaggccggccgctgcacggcctgcgtgagctgttctcgagatgaccttgtggagaagacgccatgtgcatggaactcctcccgcacctgcgaatgtcgacctggcatgatctgtgccacatcagccaccaactcctgtgcccgctgtgtcccctacccaatctgtgcagcagagacggtcaccaagccccaggatatggctgagaaggacaccacctttgaggcgccacccctggggacccagccggactgcaaccccaccccagagaatggcgaggcgcctgccagcaccagccccactcagagcttgctggtggactcccaggccagtaagacgctgcccatcccaaccagcgctcccgtcgctctctcctccacggggaagcccgttctggatgcagggccagtgctcttctgggtgatcctggtgttggttgtggtggtcggctccagcgccttcctcctgtgccaccggagggcctgcaggaagcgaattcggcagaagctccacctgtgctacccggtccagacctcccagcccaagctagagcttgtggattccagacccaggaggagctcaacgcagctgaggagtggtgcgtcggtgacagaacccgtcgcggaagagcgagggttaatgagccagccactgatggagacctgccacagcgtgggggcagcctacctggagagcctgccgctgcaggatgccagcccggccgggggcccctcgtcccccagggaccttcctgagccccgggtgtccacggagcacaccaataacaagattgagaaaatctacatcatgaaggctgacaccgtgatcgtggggaccgtgaaggctgagctgccggagggccggggcctggcggggccagcagagcccgagttggaggaggagctggaggcggaccataccccccactaccccgagcaggagacagaaccgcctctgggcagctgcagcgatgtcatgctctcagtggaagaggaagggaaagaagaccccttgcccacagctgcctctggaaagtgaggcctgggctgggctggggctaggagggcagcagggtggcctctgggaggccaggatggcactgttggcaccgaggttgggggcagaggcccatctggcctgaactgaggctccagcatctagtggtggaccggccggtcactgcaggggtctggtggtctctgcttgcatccccaacttagctgtcccctgacccagagcctaggggatccggggcttgtacagaagagacagtccaaggggactggatcccagcagtgatgttggttgaggcagcaaacagatggcaggatgggcactgccgagaacagcattggtcccagagccctgggcatcagaccttaaccaccaggcccacagcccagcgagggagaggtcgtgaggccagctcccggggcccctgtaaccctactctcctctctccctggacctcagaggtgacacccattgggcccttccggcatgcccccagttactgtaaatgtggcccccagtgggcatggagccagtgcctgtggttgtttctccagagtcaaaagggaagtcgagggatggggcgtcgtcagctggcactgtctctgctgcagcggccacactgtactctgcactggtgtgagggcccctgcctggactgtgggaccctcctggtgctgcccaccttccctgtcctgtagccccctcggtgggcccagggcctagggcccaggatcaagtcactcatctcagaatgtccccaccaatccccgccacagcaggcgcctcgggtcccagatgtctgcagccctcagcagctgcagaccgcccctcaccaacccagagaacctgctttactttgcccagggacttcctccccatgtgaacatggggaacttcgggccctgcctggagtccttgaccgctctctgtgggccccacccactctgtcctgggaaatgaagaagcatcttccttaggtctgccctgcttgcaaatccactagcaccgaccccaccacctggttccggctctgcacgctttggggtgtggatgtcgagaggcaccacggcctcacccaggcatctgctttactctggaccataggaaacaagaccgtttggaggtttcatcaggattttgggtttttcacatttcacgctaaggagtagtggccctgacttccggtcggctggccagctgactccctagggccttcagacgtgtatgcaaatgagtgatggataaggatgagtcttggagttgcgggcagcctggagactcgtggacttaccgcctggaggcaggcccgggaaggctgctgtttactcatcgggcagccacgtgctctctggaggaagtgatagtttctgaaaccgctcagatgttttggggaaagttggagaagccgtggccttgcgagaggtggttacaccagaacctggacattggccagaagaagcttaagtgggcagacactgtttgcccagtgtttgtgcaaggatggagtgggtgtctctgcatcacccacagccgcagctgtaaggcacgctggaaggcacacgcctgccaggcagggcagtctggcgcccatgatgggagggattgacatgtttcaacaaaataatgcacttccttacctagtggcccttcacacaacttttgaatctctaaaaatccataaaatccttaaagaactgtaa

SEQ ID NO: 59 - protein, 364 aa, Homo sapiens
MPLLLLLPLLWAGALAMDPNFWLQVQESVTVQEGLCVLVPCTFFHPIPYYDKNSPVHGYWFREGAIISRDSPVATNKLDQEVQEETQGRFRLLGDPSRNNCSLSIVDARRRDNGSYFFRMERGSTKYSYKSPQLSVHVTDLTHRPKILIPGTLEPGHSKNLTCSVSWACEQGTPPIFSWLSAAPTSLGPRTTHSSVLIITPRPQDHGTNLTCQVKFAGAGVTTERTIQLNVTYVPQNPTTGIFPGDGSGKQETRAGVVHGAIGGAGVTALLALCLCLIFFIVKTHRRKAARTAVGRNDTHPTTGSASPKHQKKSKLHGPTETSSCSGAAPTVEMDEELHYASLNFHGMNPSKDTSTEYSEVRTQ

SEQ ID NO: 60 - DNA, 1462 bp, Homo sapiens
ctgctcacacaggaagccctggaagctgcttcctcagacatgccgctgctgctactgctgcccctgctgtgggcaggggccctggctatggatccaaatttctggctgcaagtgcaggagtcagtgacggtacaggagggtttgtgcgtcctcgtgccctgcactttcttccatcccataccctactacgacaagaactccccagttcatggttactggttccgggaaggagccattatatccagggactctccagtggccacaaacaagctagatcaagaagtacaggaggagactcagggcagattccgcctccttggggatcccagtaggaacaactgctccctgagcatcgtagacgccaggaggagggataatggttcatacttctttcggatggagagaggaagtaccaaatacagttacaaatctccccagctctctgtgcatgtgacagacttgacccacaggcccaaaatcctcatccctggcactctagaacccggccactccaaaaacctgacctgctctgtgtcctgggcctgtgagcagggaacacccccgatcttctcctggttgtcagctgcccccacctccctgggccccaggactactcactcctcggtgctcataatcaccccacggccccaggaccacggcaccaacctgacctgtcaggtgaagttcgctggagctggtgtgactacggagagaaccatccagctcaacgtcacctatgttccacagaacccaacaactggtatctttccaggagatggctcagggaaacaagagaccagagcaggagtggttcatggggccattggaggagctggtgttacagccctgctcgctctttgtctctgcctcatcttcttcatagtgaagacccacaggaggaaagcagccaggacagcagtgggcaggaatgacacccaccctaccacagggtcagcctccccgaaacaccagaagaagtccaagttacatggccccactgaaacctcaagctgttcaggtgccgcccctactgtggagatggatgaggagctgcattatgcttccctcaactttcatgggatgaatccttccaaggacacctccaccgaatactcagaggtcaggacccagtgaggaacccacaagagcatcaggctcagctagaagatccacatcctctacaggtcggggaccaaaggctgattcttggagatttaacaccccacaggcaatgggtttatagacattatgtgagtttcctgctatattaacatcatcttagactttgcaagcagagagtcgtggaatcaaatctgtgctctttcatttgctaagtgtatgatgtcacacaagctccttaaccttccatgtctccattttcttctctgtgaagtaggtataagaagtcctatctcatagggatgctgtgagcattaaataaaggtacacatggaaaacacca

SEQ ID NO: 61 - protein, 61 aa, Homo sapiens
MKRFLFLLLTISLLVMVQIQTGLSGQNDTSQTSSPSASSNISGGIFLFFVANAIIHLFCFS

SEQ ID NO: 62 - DNA, 467 bp, Homo sapiens
agacagccctgagatcacctaaaaagctgctaccaagacagccacgaagatcctaccaaaatgaagcgcttcctcttcctcctactcaccatcagcctcctggttatggtacagatacaaactggactctcaggacaaaacgacaccagccaaaccagcagcccctcagcatccagcaacataagcggaggcattttccttttcttcgtggccaatgccataatccacctcttctgcttcagttgaggtgacacgtctcagccttagccctgtgccccctgaaacagctgccaccatcactcgcaagagaatcccctccatctttgggaggggttgatgccagacatcaccaggttgtagaagttgacaggcagtgccatgggggcaacagccaaaataggggggtaatgatgtaggggccaagcagtgcccagctgggggtcaataaagttacccttgtacttgca

SEQ ID NO: 63 - protein, 193 aa, Homo sapiens
MPEEGSGCSVRRRPYGCVLRAALVPLVAGLVICLVVCIQRFAQAQQQLPLESLGWDVAELQLNHTGPQQDPRLYWQGGPALGRSFLHGPELDKGQLRIHRDGIYMVHIQVTLAICSSTTASRHHPTTLAVGICSPASRSISLLRLSFHQGCTIASQRLTPLARGDTLCTNLTGTLLPSRNTDETFFGVQWVRP

SEQ ID NO: 64 - DNA, 911 bp, Homo sapiens
agagaggggcaggctggtcccctgacaggttgaagcaagtagacgcccaggagccccgggagggggctgcagtttccttccttccttctcggcagcgctccgcgcccccatcgcccctcctgcgctagcggaggtgatcgccgcggcgatgccggaggagggttcgggctgctcggtgcggcgcaggccctatgggtgcgtcctgcgggctgctttggtcccattggtcgcgggcttggtgatctgcctcgtggtgtgcatccagcgcttcgcacaggctcagcagcagctgccgctcgagtcacttgggtgggacgtagctgagctgcagctgaatcacacaggacctcagcaggaccccaggctatactggcaggggggcccagcactgggccgctccttcctgcatggaccagagctggacaaggggcagctacgtatccatcgtgatggcatctacatggtacacatccaggtgacgctggccatctgctcctccacgacggcctccaggcaccaccccaccaccctggccgtgggaatctgctctcccgcctcccgtagcatcagcctgctgcgtctcagcttccaccaaggttgtaccattgcctcccagcgcctgacgcccctggcccgaggggacacactctgcaccaacctcactgggacacttttgccttcccgaaacactgatgagaccttctttggagtgcagtgggtgcgcccctgaccactgctgctgattagggttttttaaattttattttattttatttaagttcaagagaaaaagtgtacacacaggggccacccggggttggggtgggagtgtggtggggggtagtggtggcaggacaagagaaggcattgagctttttctttcattttcctattaaaaaatacaaaaatca

SEQ ID NO: 65 - protein, 1131 aa, Homo sapiens
MRCLAPRPAGSYLSEPQGSSQCATMELGPLEGGYLELLNSDADPLCLYHFYDQMDLAGEEEIELYSEPDTDTINCDQFSRLLCDMEGDEETREAYANIAELDQYVFQDSQLEGLSKDIFIEHIGPDEVIGESMEMPAEVGQKSQKRPFPEELPADLKHWKPAEPPTVVTGSLLVGPVSDCSTLPCLPLPALFNQEPASGQMRLEKTDQIPMPFSSSSLSCLNLPEGPIQFVPTISTLPHGLWQISEAGTGVSSIFIYHGEVPQASQVPPPSGFTVHGLPTSPDRPGSTSPFAPSATDLPSMPEPALTSRANMTEHKTSPTQCPAAGEVSNKLPKWPEPVEQFYRSLQDTYGAEPAGPDGILVEVDLVQARLERSSSKSLERELATPDWAERQLAQGGLAEVLLAAKEHRRPRETRVIAVLGKAGQGKSYWAGAVSRAWACGRLPQYDFVFSVPCHCLNRPGDAYGLQDLLFSLGPQPLVAADEVFSHILKRPDRVLLILDGFEELEAQDGFLHSTCGPAPAEPCSLRGLLAGLFQKKLLRGCTLLLTARPRGRLVQSLSKADALFELSGFSMEQAQAYVMRYFESSGMTEHQDRALTLLRDRPLLLSHSHSPTLCRAVCQLSEALLELGEDAKLPSTLTGLYVGLLGRAALDSPPGALAELAKLAWELGRRHQSTLQEDQFPSADVRTWAMAKGLVQHPPRAAESELAFPSFLLQCFLGALWLALSGEIKDKELPQYLALTPRKKRPYDNWLEGVPRFLAGLIFQPPARCLGALLGPSAAASVDRKQKVLARYLKRLQPGTLRARQLLELLHCAHEAEEAGIWQHVVQELPGRLSFLGTRLTPPDAHVLGKALEAAGQDFSLDLRSTGICPSGLGSLVGLSCVTRFRAALSDTVALWESLQQHGETKLLQAAEEKFTIEPFKAKSLKDVEDLGKLVQTQRTRSSSEDTAGELPAVRDLKKLEFALGPVSGPQAFPKLVRILTAFSSLQHLDLDALSENKIGDEGVSQLSATFPQLKSLETLNLSQNNITDLGAYKLAEALPSLAASLLRLSLYNNCICDVGAESLARVLPDMVSLRVMDVQYNKFTAAGAQQLAASLRRCPHVETLAMWTPTIPFSVQEHLQQQDSRISLR

SEQ ID NO: 66 - DNA, 4657 bp, Homo sapiens
ggttagtgatgaggctagtgatgaggctgtgtgcttctgagctgggcatccgaaggcatccttggggaagctgagggcacgaggaggggctgccagactccgggagctgctgcctggctgggattcctacacaatgcgttgcctggctccacgccctgctgggtcctacctgtcagagccccaaggcagctcacagtgtgccaccatggagttggggcccctagaaggtggctacctggagcttcttaacagcgatgctgaccccctgtgcctctaccacttctatgaccagatggacctggctggagaagaagagattgagctctactcagaacccgacacagacaccatcaactgcgaccagttcagcaggctgttgtgtgacatggaaggtgatgaagagaccagggaggcttatgccaatatcgcggaactggaccagtatgtcttccaggactcccagctggagggcctgagcaaggacattttcatagagcacataggaccagatgaagtgatcggtgagagtatggagatgccagcagaagttgggcagaaaagtcagaaaagacccttcccagaggagcttccggcagacctgaagcactggaagccagctgagccccccactgtggtgactggcagtctcctagtgggaccagtgagcgactgctccaccctgccctgcctgccactgcctgcgctgttcaaccaggagccagcctccggccagatgcgcctggagaaaaccgaccagattcccatgcctttctccagttcctcgttgagctgcctgaatctccctgagggacccatccagtttgtccccaccatctccactctgccccatgggctctggcaaatctctgaggctggaacaggggtctccagtatattcatctaccatggtgaggtgccccaggccagccaagtaccccctcccagtggattcactgtccacggcctcccaacatctccagaccggccaggctccaccagccccttcgctccatcagccactgacctgcccagcatgcctgaacctgccctgacctcccgagcaaacatgacagagcacaagacgtcccccacccaatgcccggcagctggagaggtctccaacaagcttccaaaatggcctgagccggtggagcagttctaccgctcactgcaggacacgtatggtgccgagcccgcaggcccggatggcatcctagtggaggtggatctggtgcaggccaggctggagaggagcagcagcaagagcctggagcgggaactggccaccccggactgggcagaacggcagctggcccaaggaggcctggctgaggtgctgttggctgccaaggagcaccggcggccgcgtgagacacgagtgattgctgtgctgggcaaagctggtcagggcaagagctattgggctggggcagtgagccgggcctgggcttgtggccggcttccccagtacgactttgtcttctctgtcccctgccattgcttgaaccgtccgggggatgcctatggcctgcaggatctgctcttctccctgggcccacagccactcgtggcggccgatgaggttttcagccacatcttgaagagacctgaccgcgttctgctcatcctagacggcttcgaggagctggaagcgcaagatggcttcctgcacagcacgtgcggaccggcaccggcggagccctgctccctccgggggctgctggccggccttttccagaagaagctgctccgaggttgcaccctcctcctcacagcccggccccggggccgcctggtccagagcctgagcaaggccgacgccctatttgagctgtccggcttctccatggagcaggcccaggcatacgtgatgcgctactttgagagctcagggatgacagagcaccaagacagagccctgacgctcctccgggaccggccacttcttctcagtcacagccacagccctactttgtgccgggcagtgtgccagctctcagaggccctgctggagcttggggaggacgccaagctgccctccacgctcacgggactctatgtcggcctgctgggccgtgcagccctcgacagcccccccggggccctggcagagctggccaagctggcctgggagctgggccgcagacatcaaagtaccctacaggaggaccagttcccatccgcagacgtgaggacctgggcgatggccaaaggcttagtccaacacccaccgcgggccgcagagtccgagctggccttccccagcttcctcctgcaatgcttcctgggggccctgtggctggctctgagtggcgaaatcaaggacaaggagctcccgcagtacctagcattgaccccaaggaagaagaggccctatgacaactggctggagggcgtgccacgctttctggctgggctgatcttccagcctcccgcccgctgcctgggagccctactcgggccatcggcggctgcctcggtggacaggaagcagaaggtgcttgcgaggtacctgaagcggctgcagccggggacactgcgggcgcggcagctgctggagctgctgcactgcgcccacgaggccgaggaggctggaatttggcagcacgtggtacaggagctccccggccgcctctcttttctgggcacccgcctcacgcctcctgatgcacatgtactgggcaaggccttggaggcggcgggccaagacttctccctggacctccgcagcactggcatttgcccctctggattggggagcctcgtgggactcagctgtgtcacccgtttcagggctgccttgagcgacacggtggcgctgtgggagtccctgcagcagcatggggagaccaagctacttcaggcagcagaggagaagttcaccatcgagcctttcaaagccaagtccctgaaggatgtggaagacctgggaaagcttgtgcagactcagaggacgagaagttcctcggaagacacagctggggagctccctgctgttcgggacctaaagaaactggagtttgcgctgggccctgtctcaggcccccaggctttccccaaactggtgcggatcctcacggccttttcctccctgcagcatctggacctggatgcgctgagtgagaacaagatcggggacgagggtgtctcgcagctctcagccaccttcccccagctgaagtccttggaaaccctcaatctgtcccagaacaacatcactgacctgggtgcctacaaactcgccgaggccctgccttcgctcgctgcatccctgctcaggctaagcttgtacaataactgcatctgcgacgtgggagccgagagcttggctcgtgtgcttccggacatggtgtccctccgggtgatggacgtccagtacaacaagttcacggctgccggggcccagcagctcgctgccagccttcggaggtgtcctcatgtggagacgctggcgatgtggacgcccaccatcccattcagtgtccaggaacacctgcaacaacaggattcacggatcagcctgagatgatcccagctgtgctctggacaggcatgttctctgaggacactaaccacgctggaccttgaactgggtacttgtggacacagctcttctccaggctgtatcccatgagcctcagcatcctggcacccggcccctgctggttcagggttggcccctgcccggctgcggaatgaaccacatcttgctctgctgacagacacaggcccggctccaggctcctttagcgcccagttgggtggatgcctggtggcagctgcggtccacccaggagccccgaggccttctctgaaggacattgcggacagccacggccaggccagagggagtgacagaggcagccccattctgcctgcccaggcccctgccaccctggggagaaagtacttctttttttttatttttagacagagtctcactgttgcccaggctggcgtgcagtggtgcgatctgggttcactgcaacctccgcctcttgggttcaagcgattcttctgcttcagcctcccgagtagctgggactacaggcacccaccatcatgtctggctaatttttcatttttagtagagacagggttttgccatgttggccaggctggtctcaaactcttgacctcaggtgatccacccacctcagcctcccaaagtgctgggattacaagcgtgagccactgcaccgggccacagagaaagtacttctccaccctgctctccgaccagacaccttgacagggcacaccgggcactcagaagacactgatgggcaacccccagcctgctaattccccagattgcaacaggctgggcttcagtggcagctgcttttgtctatgggactcaatgcactgacattgttggccaaagccaaagctaggcctggccagatgcaccagcccttagcagggaaacagctaatgggacactaatggggcggtgagaggggaacagactggaagcacagcttcatttcctgtgtcttttttcactacattataaatgtctctttaatgtcacaggcaggtccagggtttgagttcataccctgttaccattttggggtacccactgctctggttatctaatatgtaacaagccaccccaaatcatagtggcttaaaacaacactcacattta

SEQ ID NO: 67 - protein, 223 aa, Homo sapiens
MACLGFQRHKAQLNLATRTWPCTLLFFLLFIPVFCKAMHVAQPAVVLASSRGIASFVCEYASPGKATEVRVTVLRQADSQVTEVCAATYMMGNELTFLDDSICTGTSSGNQVNLTIQGLRAMDTGLYICKVELMYPPPYYLGIGNGTQIYVIDPEPCPDSDFLLWILAAVSSGLFFYSFLLTAVSLSKMLKKRSPLTTGVYVKMPPTEPECEKQFQPYFIPIN

SEQ ID NO: 68 - DNA, 748 bp, Homo sapiens
gacctgaacaccgctcccataaagccatggcttgccttggatttcagcggcacaaggctcagctgaacctggctaccaggacctggccctgcactctcctgttttttcttctcttcatccctgtcttctgcaaagcaatgcacgtggcccagcctgctgtggtactggccagcagccgaggcatcgccagctttgtgtgtgagtatgcatctccaggcaaagccactgaggtccgggtgacagtgcttcggcaggctgacagccaggtgactgaagtctgtgcggcaacctacatgatggggaatgagttgaccttcctagatgattccatctgcacgggcacctccagtggaaatcaagtgaacctcactatccaaggactgagggccatggacacgggactctacatctgcaaggtggagctcatgtacccaccgccatactacctgggcataggcaacggaacccagatttatgtaattgatccagaaccgtgcccagattctgacttcctcctctggatccttgcagcagttagttcggggttgtttttttatagctttctcctcacagctgtttctttgagcaaaatgctaaagaaaagaagccctcttacaacaggggtctatgtgaaaatgcccccaacagagccagaatgtgaaaagcaatttcagccttattttattcccatcaattgagaaaccattatgaagaagagagtccatatttcaatttccaagagctgagg

SEQ ID NO: 69 - protein, 208 aa, Petromyzon marinus
MTDAEYVRIHEKLDIYTFKKQFFNNKKSVSHRCYVLFELKRRGERRACFWGYAVNKPQSGTERGIHAEIFSIRKVEEYLRDNPGQFTINWYSSWSPCADCAEKILEWYNQELRGNGHTLKIWACKLYYEKNARNQIGLWNLRDNGVGLNVMVSEHYQCCRKIFIQSSHNQLNENRWLEKTLKRAEKRRSELSIMIQVKILHTTKSPAV

SEQ ID NO: 70 - DNA, 766 bp, Petromyzon marinus
tgacacgacacagccgtgtatatgaggaagggtagctggatggggggggggggaatacgttcagagaggacattagcgagcgtcttgttggtggccttgagtctagacacctgcagacatgaccgacgctgagtacgtgagaatccatgagaagttggacatctacacgtttaagaaacagtttttcaacaacaaaaaatccgtgtcgcatagatgctacgttctctttgaattaaaacgacggggtgaacgtagagcgtgtttttggggctatgctgtgaataaaccacagagcgggacagaacgtggaattcacgccgaaatctttagcattagaaaagtcgaagaatacctgcgcgacaaccccggacaattcacgataaattggtactcatcctggagtccttgtgcagattgcgctgaaaagatcttagaatggtataaccaggagctgcgggggaacggccacactttgaaaatctgggcttgcaaactctattacgagaaaaatgcgaggaatcaaattgggctgtggaacctcagagataacggggttgggttgaatgtaatggtaagtgaacactaccaatgttgcaggaaaatattcatccaatcgtcgcacaatcaattgaatgagaatagatggcttgagaagactttgaagcgagctgaaaaacgacggagcgagttgtccattatgattcaggtaaaaatactccacaccactaagagtcctgctgtttaagaggctatgcggatggttttc

SEQ ID NO: 71 - protein, 145 aa, Homo sapiens
MDSLLMNRRKFLYQFKNVRWAKGRRETYLCYVVKRRDSATSFSLDFGYLRNKNGCHVELLFLRYISDWDLDPGRCYRVTWFTSWSPCYDCARHVADFLRGNPNLSLRIFTARLYFCEDRKAEPEGLRRLHRAGVQIAIMTFKAPV

SEQ ID NO: 72 - DNA, 10681 bp, Homo sapiens
agagaaccatcattaattgaagtgagatttttctggcctgagacttgcagggaggcaagaagacactctggacaccactatggacaggtaaagaggcagtcttctcgtgggtgattgcactggccttcctctcagagcaaatctgagtaatgagactggtagctatccctttctctcatgtaactgtctgactgataagatcagcttgatcaatatgcatatatattttttgatctgtctccttttcttctattcagatcttatacgctgtcagcccaattctttctgtttcagacttctcttgatttccctctttttcatgtggcaaaagaagtagtgcgtacaatgtactgattcgtcctgagatttgtaccatggttgaaactaatttatggtaataatattaacatagcaaatctttagagactcaaatcatgaaaaggtaatagcagtactgtactaaaaacggtagtgctaattttcgtaataattttgtaaatattcaacagtaaaacaacttgaagacacactttcctagggaggcgttactgaaataatttagctatagtaagaaaatttgtaattttagaaatgccaagcattctaaattaattgcttgaaagtcactatgattgtgtccattataaggagacaaattcattcaagcaagttatttaatgttaaaggcccaattgttaggcagttaatggcacttttactattaactaatctttccatttgttcagacgtagcttaacttacctcttaggtgtgaatttggttaaggtcctcataatgtctttatgtgcagtttttgataggttattgtcatagaacttattctattcctacatttatgattactatggatgtatgagaataacacctaatccttatactttacctcaatttaactcctttataaagaacttacattacagaataaagattttttaaaaatatatttttttgtagagacagggtcttagcccagccgaggctggtctctaagtcctggcccaagcgatcctcctgcctgggcctcctaaagtgctggaattatagacatgagccatcacatccaatatacagaataaagatttttaatggaggatttaatgttcttcagaaaattttcttgaggtcagacaatgtcaaatgtctcctcagtttacactgagattttgaaaacaagtctgagctataggtccttgtgaagggtccattggaaatacttgttcaaagtaaaatggaaagcaaaggtaaaatcagcagttgaaattcagagaaagacagaaaaggagaaaagatgaaattcaacaggacagaagggaaatatattatcattaaggaggacagtatctgtagagctcattagtgatggcaaaatgacttggtcaggattatttttaacccgcttgtttctggtttgcacggctggggatgcagctagggttctgcctcagggagcacagctgtccagagcagctgtcagcctgcaagcctgaaacactccctcggtaaagtccttcctactcaggacagaaatgacgagaacagggagctggaaacaggcccctaaccagagaagggaagtaatggatcaacaaagttaactagcaggtcaggatcacgcaattcatttcactctgactggtaacatgtgacagaaacagtgtaggcttattgtattttcatgtagagtaggacccaaaaatccacccaaagtcctttatctatgccacatccttcttatctatacttccaggacactttttcttccttatgataaggctctctctctctccacacacacacacacacacacacacacacacacacacacacacacaaacacacaccccgccaaccaaggtgcatgtaaaaagatgtagattcctctgcctttctcatctacacagcccaggagggtaagttaatataagagggatttattggtaagagatgatgcttaatctgtttaacactgggcctcaaagagagaatttcttttcttctgtacttattaagcacctattatgtgttgagcttatatatacaaagggttattatatgctaatatagtaatagtaatggtggttggtactatggtaattaccataaaaattattatccttttaaaataaagctaattattattggatcttttttagtattcattttatgttttttatgtttttgattttttaaaagacaatctcaccctgttacccaggctggagtgcagtggtgcaatcatagctttctgcagtcttgaactcctgggctcaagcaatcctcctgccttggcctcccaaagtgttgggatacagtcatgagccactgcatctggcctaggatccatttagattaaaatatgcattttaaattttaaaataatatggctaatttttaccttatgtaatgtgtatactggcaataaatctagtttgctgcctaaagtttaaagtgctttccagtaagcttcatgtacgtgaggggagacatttaaagtgaaacagacagccaggtgtggtggctcacgcctgtaatcccagcactctgggaggctgaggtgggtggatcgcttgagccctggagttcaagaccagcctgagcaacatggcaaaacgctgtttctataacaaaaattagccgggcatggtggcatgtgcctgtggtcccagctactagggggctgaggcaggagaatcgttggagcccaggaggtcaaggctgcactgagcagtgcttgcgccactgcactccagcctgggtgacaggaccagaccttgcctcaaaaaaataagaagaaaaattaaaaataaatggaaacaactacaaagagctgttgtcctagatgagctacttagttaggctgatattttggtatttaacttttaaagtcagggtctgtcacctgcactacattattaaaatatcaattctcaatgtatatccacacaaagactggtacgtgaatgttcatagtacctttattcacaaaaccccaaagtagagactatccaaatatccatcaacaagtgaacaaataaacaaaatgtgctatatccatgcaatggaataccaccctgcagtacaaagaagctacttggggatgaatcccaaagtcatgacgctaaatgaaagagtcagacatgaaggaggagataatgtatgccatacgaaattctagaaaatgaaagtaacttatagttacagaaagcaaatcagggcaggcatagaggctcacacctgtaatcccagcactttgagaggccacgtgggaagattgctagaactcaggagttcaagaccagcctgggcaacacagtgaaactccattctccacaaaaatgggaaaaaaagaaagcaaatcagtggttgtcctgtggggaggggaaggactgcaaagagggaagaagctctggtggggtgagggtggtgattcaggttctgtatcctgactgtggtagcagtttggggtgtttacatccaaaaatattcgtagaattatgcatcttaaatgggtggagtttactgtatgtaaattatacctcaatgtaagaaaaaataatgtgtaagaaaactttcaattctcttgccagcaaacgttattcaaattcctgagccctttacttcgcaaattctctgcacttctgccccgtaccattaggtgacagcactagctccacaaattggataaatgcatttctggaaaagactagggacaaaatccaggcatcacttgtgctttcatatcaaccatgctgtacagcttgtgttgctgtctgcagctgcaatggggactcttgatttctttaaggaaacttgggttaccagagtatttccacaaatgctattcaaattagtgcttatgatatgcaagacactgtgctaggagccagaaaacaaagaggaggagaaatcagtcattatgtgggaacaacatagcaagatatttagatcattttgactagttaaaaaagcagcagagtacaaaatcacacatgcaatcagtataatccaaatcatgtaaatatgtgcctgtagaaagactagaggaataaacacaagaatcttaacagtcattgtcattagacactaagtctaattattattattagacactatgatatttgagatttaaaaaatctttaatattttaaaatttagagctcttctatttttccatagtattcaagtttgacaatgatcaagtattactctttctttttttttttttttttttttttttgagatggagttttggtcttgttgcccatgctggagtggaatggcatgaccatagctcactgcaacctccacctcctgggttcaagcaaagctgtcgcctcagcctcccgggtagatgggattacaggcgcccaccaccacactcggctaatgtttgtatttttagtagagatggggtttcaccatgttggccaggctggtctcaaactcctgacctcagaggatccacctgcctcagcctcccaaagtgctgggattacagatgtaggccactgcgcccggccaagtattgctcttatacattaaaaaacaggtgtgagccactgcgcccagccaggtattgctcttatacattaaaaaataggccggtgcagtggctcacgcctgtaatcccagcactttgggaagccaaggcgggcagaacacccgaggtcaggagtccaaggccagcctggccaagatggtgaaaccccgtctctattaaaaatacaaacattacctgggcatgatggtgggcgcctgtaatcccagctactcaggaggctgaggcaggaggatccgcggagcctggcagatctgcctgagcctgggaggttgaggctacagtaagccaagatcatgccagtatacttcagcctgggcgacaaagtgagaccgtaacaaaaaaaaaaaaatttaaaaaaagaaatttagatcaagatccaactgtaaaaagtggcctaaacaccacattaaagagtttggagtttattctgcaggcagaagagaaccatcagggggtcttcagcatgggaatggcatggtgcacctggtttttgtgagatcatggtggtgacagtgtggggaatgttattttggagggactggaggcagacagaccggttaaaaggccagcacaacagataaggaggaagaagatgagggcttggaccgaagcagagaagagcaaacagggaaggtacaaattcaagaaatattggggggtttgaatcaacacatttagatgattaattaaatatgaggactgaggaataagaaatgagtcaaggatggttccaggctgctaggctgcttacctgaggtggcaaagtcgggaggagtggcagtttaggacagggggcagttgaggaatattgttttgatcattttgagtttgaggtacaagttggacacttaggtaaagactggaggggaaatctgaatatacaattatgggactgaggaacaagtttattttattttttgtttcgttttcttgttgaagaacaaatttaattgtaatcccaagtcatcagcatctagaagacagtggcaggaggtgactgtcttgtgggtaagggtttggggtccttgatgagtatctctcaattggccttaaatataagcaggaaaaggagtttatgatggattccaggctcagcagggctcaggagggctcaggcagccagcagaggaagtcagagcatcttctttggtttagcccaagtaatgacttccttaaaaagctgaaggaaaatccagagtgaccagattataaactgtactcttgcattttctctccctcctctcacccacagcctcttgatgaaccggaggaagtttctttaccaattcaaaaatgtccgctgggctaagggtcggcgtgagacctacctgtgctacgtagtgaagaggcgtgacagtgctacatccttttcactggactttggttatcttcgcaataaggtatcaattaaagtcggctttgcaagcagtttaatggtcaactgtgagtgcttttagagccacctgctgatggtattacttccatccttttttggcatttgtgtctctatcacattcctcaaatccttttttttatttctttttccatgtccatgcacccatattagacatggcccaaaatatgtgatttaattcctccccagtaatgctgggcaccctaataccactccttccttcagtgccaagaacaactgctcccaaactgtttaccagctttcctcagcatctgaattgcctttgagattaattaagctaaaagcatttttatatgggagaatattatcagcttgtccaagcaaaaattttaaatgtgaaaaacaaattgtgtcttaagcatttttgaaaattaaggaagaagaatttgggaaaaaattaacggtggctcaattctgtcttccaaatgatttcttttccctcctactcacatgggtcgtaggccagtgaatacattcaacatggtgatccccagaaaactcagagaagcctcggctgatgattaattaaattgatctttcggctacccgagagaattacatttccaagagacttcttcaccaaaatccagatgggtttacataaacttctgcccacgggtatctcctctctcctaacacgctgtgacgtctgggcttggtggaatctcagggaagcatccgtggggtggaaggtcatcgtctggctcgttgtttgatggttatattaccatgcaattttctttgcctacatttgtattgaatacatcccaatctccttcctattcggtgacatgacacattctatttcagaaggctttgattttatcaagcactttcatttacttctcatggcagtgcctattacttctcttacaatacccatctgtctgctttaccaaaatctatttccccttttcagatcctcccaaatggtcctcataaactgtcctgcctccacctagtggtccaggtatatttccacaatgttacatcaacaggcacttctagccattttccttctcaaaaggtgcaaaaagcaacttcataaacacaaattaaatcttcggtgaggtagtgtgatgctgcttcctcccaactcagcgcacttcgtcttcctcattccacaaaaacccatagccttccttcactctgcaggactagtgctgccaagggttcagctctacctactggtgtgctcttttgagcaagttgcttagcctctctgtaacacaaggacaatagctgcaagcatccccaaagatcattgcaggagacaatgactaaggctaccagagccgcaataaaagtcagtgaattttagcgtggtcctctctgtctctccagaacggctgccacgtggaattgctcttcctccgctacatctcggactgggacctagaccctggccgctgctaccgcgtcacctggttcacctcctggagcccctgctacgactgtgcccgacatgtggccgactttctgcgagggaaccccaacctcagtctgaggatcttcaccgcgcgcctctacttctgtgaggaccgcaaggctgagcccgaggggctgcggcggctgcaccgcgccggggtgcaaatagccatcatgaccttcaaaggtgcgaaagggccttccgcgcaggcgcagtgcagcagcccgcattcgggattgcgatgcggaatgaatgagttagtggggaagctcgaggggaagaagtgggcggggattctggttcacctctggagccgaaattaaagattagaagcagagaaaagagtgaatggctcagagacaaggccccgaggaaatgagaaaatggggccagggttgcttctttcccctcgatttggaacctgaactgtcttctacccccatatccccgcctttttttcctttttttttttttgaagattatttttactgctggaatacttttgtagaaaaccacgaaagaactttcaaagcctgggaagggctgcatgaaaattcagttcgtctctccagacagcttcggcgcatccttttggtaaggggcttcctcgctttttaaattttctttctttctctacagtcttttttggagtttcgtatatttcttatattttcttattgttcaatcactctcagttttcatctgatgaaaactttatttctcctccacatcagctttttcttctgctgtttcaccattcagagccctctgctaaggttccttttccctcccttttctttcttttgttgtttcacatctttaaatttctgtctctccccagggttgcgtttccttcctggtcagaattcttttctcctttttttttttttttttttttttttttaaacaaacaaacaaaaaacccaaaaaaactctttcccaatttactttcttccaacatgttacaaagccatccactcagtttagaagactctccggccccaccgacccccaacctcgttttgaagccattcactcaatttgcttctctctttctctacagcccctgtatgaggttgatgacttacgagacgcatttcgtactttgggactttgatagcaacttccaggaatgtcacacacgatgaaatatctctgctgaagacagtggataaaaaacagtccttcaagtcttctctgtttttattcttcaactctcactttcttagagtttacagaaaaaatatttatatacgactctttaaaaagatctatgtcttgaaaatagagaaggaacacaggtctggccagggacgtgctgcaattggtgcagttttgaatgcaacattgtcccctactgggaataacagaactgcaggacctgggagcatcctaaagtgtcaacgtttttctatgacttttaggtaggatgagagcagaaggtagatcctaaaaagcatggtgagaggatcaaatgtttttatatcaacatcctttattatttgattcatttgagttaacagtggtgttagtgatagatttttctattcttttcccttgacgtttactttcaagtaacacaaactcttccatcaggccatgatctataggacctcctaatgagagtatctgggtgattgtgaccccaaaccatctctccaaagcattaatatccaatcatgcgctgtatgttttaatcagcagaagcatgtttttatgtttgtacaaaagaagattgttatgggtggggatggaggtatagaccatgcatggtcaccttcaagctactttaataaaggatcttaaaatgggcaggaggactgtgaacaagacaccctaataatgggttgatgtctgaagtagcaaatcttctggaaacgcaaactcttttaaggaagtccctaatttagaaacacccacaaacttcacatatcataattagcaaacaattggaaggaagttgcttgaatgttggggagaggaaaatctattggctctcgtgggtctcttcatctcagaaatgccaatcaggtcaaggtttgctacattttgtatgtgtgtgatgcttctcccaaaggtatattaactatataagagagttgtgacaaaacagaatgataaagctgcgaaccgtggcacacgctcatagttctagctgcttgggaggttgaggagggaggatggcttgaacacaggtgttcaaggccagcctgggcaacataacaagatcctgtctctcaaaaaaaaaaaaaaaaaaaagaaagagagagggccgggcgtggtggctcacgcctgtaatcccagcactttgggaggccgagccgggcggatcacctgtggtcaggagtttgagaccagcctggccaacatggcaaaaccccgtctgtactcaaaatgcaaaaattagccaggcgtggtagcaggcacctgtaatcccagctacttgggaggctgaggcaggagaatcgcttgaacccaggaggtggaggttgcagtaagctgagatcgtgccgttgcactccagcctgggcgacaagagcaagactctgtctcagaaaaaaaaaaaaaaaagagagagagagagaaagagaacaatatttgggagagaaggatggggaagcattgcaaggaaattgtgctttatccaacaaaatgtaaggagccaataagggatccctatttgtctcttttggtgtctatttgtccctaacaactgtctttgacagtgagaaaaatattcagaataaccatatccctgtgccgttattacctagcaacccttgcaatgaagatgagcagatccacaggaaaacttgaatgcacaactgtcttattttaatcttattgtacataagtttgtaaaagagttaaaaattgttacttcatgtattcatttatattttatattattttgcgtctaatgattttttattaacatgatttccttttctgatatattgaaatggagtctcaaagcttcataaatttataactttagaaatgattctaataacaacgtatgtaattgtaacattgcagtaatggtgctacgaagccatttctcttgatttttagtaaacttttatgacagcaaatttgcttctggctcactttcaatcagttaaataaatgataaataattttggaagctgtgaagataaaataccaaataaaataatataaaagtgatttatatgaagttaaaataaaaaatcagtatgatggaataaacttg

SEQ ID NO: 73 - protein, 198 aa, Homo sapiens [sequence omitted]

SEQ ID NO: 74 - protein, 198 aa, Mus musculus
MDSLLMKQKKFLYHFKNVRWAKGRHETYLCYVVKRRDSATSCSLDFGHLRNKSGCHVELLFLRYISDWDLDPGRCYRVTWFTSWSPCYDCARHVAEFLRWNPNLSLRIFTARLYFCEDRKAEPEGLRRLHRAGVQIGIMTFKDYFYCWNTFVENRERTFKAWEGLHENSVRLTRQLRRILLPLYEVDDLRDAFRMLGF

SEQ ID NO: 75 - protein, 198 aa, Canis lupus
MDSLLMKQRKFLYHFKNVRWAKGRHETYLCYVVKRRDSATSFSLDFGHLRNKSGCHVELLFLRYISDWDLDPGRCYRVTWFTSWSPCYDCARHVADFLRGYPNLSLRIFAARLYFCEDRKAEPEGLRRLHRAGVQIAIMTFKDYFYCWNTFVENREKTFKAWEGLHENSVRLSRQLRRILLPLYEVDDLRDAFRTLGL

SEQ ID NO: 76 - protein, 199 aa, Bos sp.
MDSLLKKQRQFLYQFKNVRWAKGRHETYLCYVVKRRDSPTSFSLDFGHLRNKAGCHVELLFLRYISDWDLDPGRCYRVTWFTSWSPCYDCARHVADFLRGYPNLSLRIFTARLYFCDKERKAEPEGLRRLHRAGVQIAIMTFKDYFYCWNTFVENHERTFKAWEGLHENSVRLSRQLRRILLPLYEVDDLRDAFRTLGL

SEQ ID NO: 77 - protein, 239 aa, Rattus norvegicus
MAVGSKPKAALVGPHWERERIWCFLCSTGLGTQQTGQTSRWLRPAATQDPVSPPRSLLMKQRKFLYHFKNVRWAKGRHETYLCYVVKRRDSATSFSLDFGYLRNKSGCHVELLFLRYISDWDLDPGRCYRVTWFTSWSPCYDCARHVADFLRGNPNLSLRIFTARLTGWGALPAGLMSPARPSDYFYCWNTFVENHERTFKAWEGLHENSVRLSRRLRRILLPLYEVDDLRDAFRTLGL

SEQ ID NO: 78 - protein, 429 aa, Mus musculus
MGPFCLGCSHRKCYSPIRNLISQETFKFHFKNLGYAKGRKDTFLCYEVTRKDCDSPVSLHHGVFKNKDNIHAEICFLYWFHDKVLKVLSPREEFKITWYMSWSPCFECAEQIVRFLATHHNLSLDIFSSRLYNVQDPETQQNLCRLVQEGAQVAAMDLYEFKKCWKKFVDNGGRRFRPWKRLLTNFRYQDSKLQEILRPCYIPVPSSSSSTLSNICLTKGLPETRFCVEGRRMDPLSEEEFYSQFYNQRVKHLCYYHRMKPYLCYQLEQFNGQAPLKGCLLSEKGKQHAEILFLDKIRSMELSQVTITCYLTWSPCPNCAWQLAAFKRDRPDLILHIYTSRLYFHWKRPFQKGLCSLWQSGILVDVMDLPQFTDCWTNFVNPKRPFWPWKGLEIISRRTQRRLRRIKESWGLQDLVNDFGNLQLGPPMS

SEQ ID NO: 79 - protein, 430 aa, Rattus norvegicus
MGPFCLGCSHRKCYSPIRNLISQETFKFHFKNRLRYAIDRKDTFLCYEVTRKDCDSPVSLHHGVFKNKDNIHAEICFLYWFHDKVLKVLSPREEFKITWYMSWSPCFECAEQVLRFLATHHNLSLDIFSSRLYNIRDPENQQNLCRLVQEGAQVAAMDLYEFKKCWKKFVDNGGRRFRPWKKLLTNFRYQDSKLQEILRPCYIPVPSSSSSTLSNICLTKGLPETRFCVERRRVHLLSEEEFYSQFYNQRVKHLCYYHGVKPYLCYQLEQFNGQAPLKGCLLSEKGKQHAEILFLDKIRSMELSQVIITCYLTWSPCPNCAWQLAAFKRDRPDLILHIYTSRLYFHWKRPFQKGLCSLWQSGILVDVMDLPQFTDCWTNFVNPKRPFWPWKGLEIISRRTQRRLHRIKESWGLQDLVNDFGNLQLGPPMS

SEQ ID NO: 80 - protein, 370 aa, Macaca mulatta
MVEPMDPRTFVSNFNNRPILSGLNTVWLCCEVKTKDPSGPPLDAKIFQGKVYSKAKYHPEMRFLRWFHKWRQLHHDQEYKVTWYVSWSPCTRCANSVATFLAKDPKVTLTIFVARLYYFWKPDYQQALRILCQKRGGPHATMKIMNYNEFQDCWNKFVDGRGKPFKPRNNLPKHYTLLQATLGELLRHLMDPGTFTSNFNNKPWVSGQHETYLCYKVERLHNDTWVPLNQHRGFLRNQAPNIHGFPKGRHAELCFLDLIPFWKLDGQQYRVTCFTSWSPCFSCAQEMAKFISNNEHVSLCIFAARIYDDQGRYQEGLRALHRDGAKIAMMNYSEFEYCWDTFVDRQGRPFQPWDGLDEHSQALSGRLRAI

SEQ ID NO: 81 - protein, 384 aa, Pan sp.
MKPHFRNPVERMYQDTFSDNFYNRPILSHRNTVWLCYEVKTKGPSRPPLDAKIFRGQVYSKLKYHPEMRFFHWFSKWRKLHRDQEYEVTWYISWSPCTKCTRDVATFLAEDPKVTLTIFVARLYYFWDPDYQEALRSLCQKRDGPRATMKIMNYDEFQHCWSKFVYSQRELFEPWNNLPKYYILLHIMLGEILRHSMDPPTFTSNFNNELWVRGRHETYLCYEVERLHNDTWVLLNQRRGFLCNQAPHKHGFLEGRHAELCFLDVIPFWKLDLHQDYRVTCFTSWSPCFSCAQEMAKFISNNKHVSLCIFAARIYDDQGRCQEGLRTLAKAGAKISIMTYSEFKHCWDTFVDHQGCPFQPWDGLEEHSQALSGRLRAILQNQGN

SEQ ID NO: 82 - protein, 377 aa, Chlorocebus sabaeus
MNPQIRNMVEQMEPDIFVYYFNNRPILSGRNTVWLCYEVKTKDPSGPPLDANIFQGKLYPEAKDHPEMKFLHWFRKWRQLHRDQEYEVTWYVSWSPCTRCANSVATFLAEDPKVTLTIFVARLYYFWKPDYQQALRILCQERGGPHATMKIMNYNEFQHCWNEFVDGQGKPFKPRKNLPKHYTLLHATLGELLRHVMDPGTFTSNFNNKPWVSGQRETYLCYKVERSHNDTWVLLNQHRGFLRNQAPDRHGFPKGRHAELCFLDLIPFWKLDDQQYRVTCFTSWSPCFSCAQKMAKFISNNKHVSLCIFAARIYDDQGRCQEGLRTLHRDGAKIAVMNYSEFEYCWDTFVDRQGRPFQPWDGLDEHSQALSGRLRAI

SEQ ID NO: 83 - protein, 384 aa, Homo sapiens
MKPHFRNTVERMYRDTFSYNFYNRPILSRRNTVWLCYEVKTKGPSRPPLDAKIFRGQVYSELKYHPEMRFFHWFSKWRKLHRDQEYEVTWYISWSPCTKCTRDMATFLAEDPKVTLTIFVARLYYFWDPDYQEALRSLCQKRDGPRATMKIMNYDEFQHCWSKFVYSQRELFEPWNNLPKYYILLHIMLGEILRHSMDPPTFTFNFNNEPWVRGRHETYLCYEVERMHNDTWVLLNQRRGFLCNQAPHKHGFLEGRHAELCFLDVIPFWKLDLDQDYRVTCFTSWSPCFSCAQEMAKFISKNKHVSLCIFTARIYDDQGRCQEGLRTLAEAGAKISIMTYSEFKHCWDTFVDHQGCPFQPWDGLDEHSQDLSGRLRAILQNQEN

SEQ ID NO: 84 - protein, 373 aa, Homo sapiens
MKPHFRNTVERMYRDTFSYNFYNRPILSRRNTVWLCYEVKTKGPSRPRLDAKIFRGQVYSQPEHHAEMCFLSWFCGNQLPAYKCFQITWFVSWTPCPDCVAKLAEFLAEHPNVTLTISAARLYYYWERDYRRALCRLSQAGARVKIMDDEEFAYCWENFVYSEGQPFMPWYKFDDNYAFLHRTLKEILRNPMEAMYPHIFYFHFKNLRKAYGRNESWLCFTMEVVKHHSPVSWKRGVFRNQVDPETHCHAERCFLSWFCDDILSPNTNYEVTWYTSWSPCPECAGEVAEFLARHSNVNLTIFTARLYYFWDTDYQEGLRSLSQEGASVEIMGYKDFKYCWENFVYNDDEPFKPWKGLKYNFLFLDSKLQEILE

SEQ ID NO: 85 - protein, 382 aa, Homo sapiens
MNPQIRNPMERMYRDTFYDNFENEPILYGRSYTWLCYEVKIKRGRSNLLWDTGVFRGQVYFKPQYHAEMCFLSWFCGNQLPAYKCFQITWFVSWTPCPDCVAKLAEFLSEHPNVTLTISAARLYYYWERDYRRALCRLSQAGARVTIMDYEEFAYCWENFVYNEGQQFMPWYKFDENYAFLHRTLKEILRYLMDPDTFTFNFNNDPLVLRRRQTYLCYEVERLDNGTWVLMDQHMGFLCNEAKNLLCGFYGRHAELRFLDLVPSLQLDPAQIYRVTWFISWSPCFSWGCAGEVRAFLQENTHVRLRIFAARIYDYDPLYKEALQMLRDAGAQVSIMTYDEFEYCWDTFVYRQGCPFQPWDGLEEHSQALSGRLRAILQNQGN

SEQ ID NO: 86 - protein, 395 aa, Rattus norvegicus
MQPQGLGPNAGMGPVCLGCSHRRPYSPIRNPLKKLYQQTFYFHFKNVRYAWGRKNNFLCYEVNGMDCALPVPLRQGVFRKQGHIHAELCFIYWFHDKVLRVLSPMEEFKVTWYMSWSPCSKCAEQVARFLAAHRNLSLAIFSSRLYYYLRNPNYQQKLCRLIQEGVHVAAMDLPEFKKCWNKFVDNDGQPFRPWMRLRINFSFYDCKLQEIFSRMNLLREDVFYLQFNNSHRVKPVQNRYYRRKSYLCYQLERANGQEPLKGYLLYKKGEQHVEILFLEKMRSMELSQVRITCYLTWSPCPNCARQLAAFKKDHPDLILRIYTSRLYFWRKKFQKGLCTLWRSGIHVDVMDLPQFADCWTNFVNPQRPFRPWNELEKNSWRIQRRLRRIKESWGL

SEQ ID NO: 87 - protein, 226 aa, Bos sp.
DGWEVAFRSGTVLKAGVLGVSMTEGWAGSGHPGQGACVWTPGTRNTMNLLREVLFKQQFGNQPRVPAPYYRRKTYLCYQLKQRNDLTLDRGCFRNKKQRHAERFIDKINSLDLNPSQSYKIICYITWSPCPNCANELVNFITRNNHLKLEIFASRLYFHWIKSFKMGLQDLQNAGISVAVMTHTEFEDCWEQFVDNQSRPFQPWDKLEQYSASIRRRLQRILTAPI

SEQ ID NO: 88 - protein, 490 aa, Pan sp.
MNPQIRNPMEWMYQRTFYYNFENEPILYGRSYTWLCYEVKIRRGHSNLLWDTGVFRGQMYSQPEHHAEMCFLSWFCGNQLSAYKCFQITWFVSWTPCPDCVAKLAKFLAEHPNVTLTISAARLYYYWERDYRRALCRLSQAGARVKIMDDEEFAYCWENFVYNEGQPFMPWYKFDDNYAFLHRTLKEIIRHLMDPDTFTFNFNNDPLVLRRHQTYLCYEVERLDNGTWVLMDQHMGFLCNEAKNLLCGFYGRHAELRFLDLVPSLQLDPAQIYRVTWFISWSPCFSWGCAGQVRAFLQENTHVRLRIFAARIYDYDPLYKEALQMLRDAGAQVSIMTYDEFEYCWDTFVYRQGCPFQPWDGLEEHSQALSGRLRAILQVRASSLCMVPHRPPPPPQSPGPCLPLCSEPPLGSLLPTGRPAPSLPFLLTASFSFPPPASLPPLPSLSLSPGHLPVPSFHSLTSCSIQPPCSSRIRETEGWASVSKEGRDLG

SEQ ID NO: 89 - protein, 190 aa, Homo sapiens
MNPQIRNPMKAMYPGTFYFQFKNLWEANDRNETWLCFTVEGIKRRSVVSWKTGVFRNQVDSETHCHAERCFLSWFCDDILSPNTKYQVTWYTSWSPCPDCAGEVAEFLARHSNVNLTIFTARLYYFQYPCYQEGLRSLSQEGVAVEIMDYEDFKYCWENFVYNDNEPFKPWKGLKTNFRLLKRRLRESLQ

SEQ ID NO: 90 - protein, 190 aa, Gorilla sp.
MNPQIRNPMKAMYPGTFYFQFKNLWEANDRNETWLCFTVEGIKRRSVVSWKTGVFRNQVDSETHCHAERCFLSWECDDILSPNTNYQVTWYTSWSPCPECAGEVAEFLARHSNVNLTIFTARLYYFQDTDYQEGLRSLSQEGVAVKIMDYKDFKYCWENFVYNDDEPFKPWKGLKYNFRFLKRRLQEILE

SEQ ID NO: 91 - protein, 199 aa, Homo sapiens
MEASPASGPRHLMDPHIFTSNFNNGIGRHKTYLCYEVERLDNGTSVKMDQHRGFLHNQAKNLLCGFYGRHAELRFLDLVPSLQLDPAQIYRVTWFISWSPCFSWGCAGEVRAFLQENTHVRLRIFAARIYDYDPLYKEALQMLRDAGAQVSIMTYDEFKHCWDTFVDHQGCPFQPWDGLDEHSQALSGRLRAILQNQGN

SEQ ID NO: 92 - protein, 202 aa, Macaca mulatta
MDGSPASRPRHLMDPNTFTFNFNNDLSVRGRHQTYLCYEVERLDNGTWVPMDERRGFLCNKAKNVPCGDYGCHVELRFLCEVPSWQLDPAQTYRVTWFISWSPCFRRGCAGQVRVFLQENKHVRLRIFAARIYDYDPLYQEALRTLRDAGAQVSIMTYEEFKHCWDTFVDRQGRPFQPWDGLDEHSQALSGRLRAILQNQGN

SEQ ID NO: 93 - protein, 185 aa, Bos sp.
MDEYTFTENFNNQGWPSKTYLCYEMERLDGDATIPLDEYKGFVRNKGLDQPEKPCHAELYFLGKIHSWNLDRNQHYRLTCFISWSPCYDCAQKLTTFLKENHHISLHILASRIYTHNRFGCHQSGLCELQAAGARITIMTFEDFKHCWETFVDHKGKPFQPWEGLNVKSQALCTELQAILKTQQN

SEQ ID NO: 94 - protein, 200 aa, Homo sapiens
MALLTAETFRLQFNNKRRLRRPYYPRKALLCYQLTPQNGSTPTRGYFENKKKCHAEICFINEIKSMGLDETQCYQVTCYLTWSPCSSCAWELVDFIKAHDHLNLGIFASRLYYHWCKPQQKGLRLLCGSQVPVEVMGFPKFADCWENFVDHEKPLSFNPYKMLEELDKNSRAIKRRLERIKIPGVRAQGRYMDILCDAEV

SEQ ID NO: 95 - protein, 210 aa, Macaca mulatta
MALLTAKTFSLQFNNKRRVNKPYYPRKALLCYQLTPQNGSTPTRGHLKNKKKDHAEIRFINKIKSMGLDETQCYQVTCYLTWSPCPSCAGELVDFIKAHRHLNLRIFASRLYYHWRPNYQEGLLLLCGSQVPVEVMGLPEFTDCWENFVDHKEPPSFNPSEKLEELDKNSQAIKRRLERIKSRSVDVLENGLRSLQLGPVTPSSSIRNSR

SEQ ID NO: 96 - protein, 386 aa, Homo sapiens
MNPQIRNPMERMYRDTFYDNFENEPILYGRSYTWLCYEVKIKRGRSNLLWDTGVFRGPVLPKRQSNHRQEVYFRFENHAEMCFLSWFCGNRLPANRRFQITWFVSWNPCLPCVVKVTKFLAEHPNVTLTISAARLYYYRDRDWRWVLLRLHKAGARVKIMDYEDFAYCWENFVCNEGQPFMPWYKFDDNYASLHRTLKEILRNPMEAMYPHIFYFHFKNLLKACGRNESWLCFTMEVTKHHSAVFRKRGVFRNQVDPETHCHAERCFLSWFCDDILSPNTNYEVTWYTSWSPCPECAGEVAEFLARHSNVNLTIFTARLCYFWDTDYQEGLCSLSQEGASVKIMGYKDFVSCWKNFVYSDDEPFKPWKGLQTNFRLLKRRLREILQ

SEQ ID NO: 97 - protein, 236 aa, Homo sapiens
MTSEKGPSTGDPTLRRRIEPWEFDVFYDPRELRKEACLLYEIKWGMSRKIWRSSGKNTTNHVEVNFIKKFTSERDFHPSMSCSITWFLSWSPCWECSQAIREFLSRHPGVTLVIYVARLFWHMDQQNRQGLRDLVNSGVTIQIMRASEYYHCWRNFVNYPPGDEAHWPQYPPLWMMLYALELHCIILSLPPCLKISRRWQNHLTFFRLHLQNCHYQTIPPHILLATGLIHPSVAWR

SEQ ID NO: 98 - protein, 229 aa, Mus musculus
MSSETGPVAVDPTLRRRIEPHEFEVFFDPRELRKETCLLYEINWGGRHSVWRHTSQNTSNHVEVNFLEKFTTERYFRPNTRCSITWFLSWSPCGECSRAITEFLSRHPYVTLFIYIARLYHHTDQRNRQGLRDLISSGVTIQIMTEQEYCYCWRNFVNYPPSNEAYWPRYPHLWVKLYVLELYCIILGLPPCLKILRRKQPQLTFFTITLQTCHYQRIPPHLLWATGLK

SEQ ID NO: 99 - protein, 229 aa, Rattus norvegicus [sequence omitted]

SEQ ID NO: 100 - protein, 224 aa, Homo sapiens
MAQKEEAAVATEAASQNGEDLENLDDPEKLKELIELPPFEIVTGERLPANFFKFQFRNVEYSSGRNKTFLCYVVEAQGKGGQVQASRGYLEDEHAAAHAEEAFFNTILPAFDPALRYNVTWYVSSSPCAACADRIIKTLSKTKNLRLLILVGRLFMWEEPEIQAALKKLKEAGCKLRIMKPQDFEYVWQNFVEQEEGESKAFQPWEDIQENFLYYEEKLADILK

SEQ ID NO: 101 - protein, 224 aa, Mus musculus
MAQKEEAAEAAAPASQNGDDLENLEDPEKLKELIDLPPFEIVTGVRLPVNFFKFQFRNVEYSSGRNKTFLCYVVEVQSKGGQAQATQGYLEDEHAGAHAEEAFFNTILPAFDPALKYNVTWYVSSSPCAACADRILKTLSKTKNLRLLILVSRLFMWEEPEVQAALKKLKEAGCKLRIMKPQDFEYIWQNFVEQEEGESKAFEPWEDIQENFLYYEEKLADILK

SEQ ID NO: 102 - protein, 224 aa, Rattus norvegicus
MAQKEEAAEAAAPASQNGDDLENLEDPEKLKELIDLPPFEIVTGVRLPVNFFKFQFRNVEYSSGRNKTFLCYVVEAQSKGGQVQATQGYLEDEHAGAHAEEAFFNTILPAFDPALKYNVTWYVSSSPCAACADRILKTLSKTKNLRLLILVSRLFMWEEPEVQAALKKLKEAGCKLRIMKPQDFEYLWQNFVEQEEGESKAFEPWEDIQENFLYYEEKLADILK

SEQ ID NO: 103 - protein, 224 aa, Bos sp.
MAQKEEAAAAAEPASQNGEEVENLEDPEKLKELIELPPFEIVTGERLPAHYFKFQFRNVEYSSGRNKTFLCYVVEAQSKGGQVQASRGYLEDEHATNHAEEAFFNSIMPTFDPALRYMVTWYVSSSPCAACADRIVKTLNKTKNLRLLILVGRLFMWEEPEIQAALRKLKEAGCRLRIMKPQDFEYIWQNFVEQEEGESKAFEPWEDIQENFLYYEEKLADILK

SEQ ID NO: 104 - protein, 208 aa, Petromyzon marinus
MTDAEYVRIHEKLDIYTFKKQFFNNKKSVSHRCYVLFELKRRGERRACFWGYAVNKPQSGTERGIHAEIFSIRKVEEYLRDNPGQFTINWYSSWSPCADCAEKILEWYNQELRGNGHTLKIWACKLYYEKNARNQIGLWNLRDNGVGLNVMVSEHYQCCRKIFIQSSHNQLNENRWLEKTLKRAEKRRSELSFMIQVKILHTTKSPAV

SEQ ID NO: 105 - protein, 381 aa, Homo sapiens
MKPHFRNTVERMYRDTFSYNFYNRPILSRRNTVWLCYEVKTKGPSRPPLDAKIFRGQVYSELKYHPEMRFFHWFSKWRKLHRDQEYEVTWYISWSPCTKCTRDMATFLAEDPKVTLTIFVARLYYFWDPDYQEALRSLCQKRDGPRATMKFNYDEFQHCWSKFVYSQRELFEPWNNLPKYYILLHFMLGEILRHSMDPPTFTFNFNNEPWVRGRHETYLCYEVERMHNDTWVLLNQRRGFLCNQAPHKHGFLEGRHAELCFLDVIPFWKLDLDQDYRVTCFTSWSPCFSCAQEMAKFISKKHVSLCIFTARIYRRQGRCQEGLRTLAEAGAKISFTYSEFKHCWDTFVDHQGCPFQPWDGLDEHSQDLSGRLRAILQNQEN

SEQ ID NO: 106 - protein, 182 aa, Homo sapiens
MDPPTFTFNFNNEPWWGRHETYLCYEVERMHNDTWVLLNQRRGFLCNQAPHKHGFLEGRHAELCFLDVIPFWKLDLDQDYRVTCFTSWSPCFSCAQEMAKFISKNKHVSLCIFTARIYDDQGRCQEGLRTLAEAGAKISFTYSEFKHCWDTFVDHQGCPFQPWDGLDEHSQDLSGRLRAILQ

SEQ ID NO: 107 - protein, 184 aa, Homo sapiens
MDPPTFTFNFNNEPWVRGRHETYLCYEVERMHNDTWVLLNQRRGFLCNQAPHKHGFLEGRHAELCFLDVIPFWKLDLDQDYRVTCFTSWSPCFSCAQEMAKFISKNKHVSLCIFTARIYRRQGRCQEGLRTLAEAGAKISFMTYSEFKHCWDTFVDHQGCPFQPWDGLDEHSQDLSGRLRAILQ

SEQ ID NO: 108 - protein, 16 aa, Artificial Sequence
  Description of Artificial Sequence: Synthetic peptide
SGSETPGTSESATPES

SEQ ID NO: 109 - protein, 4 aa, Artificial Sequence
  Description of Artificial Sequence: Synthetic peptide
SGGS

SEQ ID NO: 110 - protein, 120 aa, Artificial Sequence
  Description of Artificial Sequence: Synthetic polypeptide
  MISC_FEATURE (1)..(120): This sequence may encompass 1-30 "Ser Gly Gly Ser" repeating units
SGGSSGGSSGGSSGGSSGGSSGGSSGGSSGGSSGGSSGGSSGGSSGGSSGGSSGGSSGGSSGGSSGGSSGGSSGGSSGGSSGGSSGGSSGGSSGGSSGGSSGGSSGGSSGGSSGGSSGGS

SEQ ID NO: 111 - protein, 120 aa, Artificial Sequence
  Description of Artificial Sequence: Synthetic polypeptide
  MISC_FEATURE (1)..(120): This sequence may encompass 1-30 "Gly Gly Gly Ser" repeating units
GGGSGGGSGGGSGGGSGGGSGGGSGGGSGGGSGGGSGGGSGGGSGGGSGGGSGGGSGGGSGGGSGGGSGGGSGGGSGGGSGGGSGGGSGGGSGGGSGGGSGGGSGGGSGGGSGGGSGGGS

SEQ ID NO: 112 - protein, 150 aa, Artificial Sequence
  Description of Artificial Sequence: Synthetic polypeptide
  MISC_FEATURE (1)..(150): This sequence may encompass 1-30 "Gly Gly Gly Gly Ser" repeating units
GGGGSGGGGSGGGGSGGGGSGGGGSGGGGSGGGGSGGGGSGGGGSGGGGSGGGGSGGGGSGGGGSGGGGSGGGGSGGGGSGGGGSGGGGSGGGGSGGGGSGGGGSGGGGSGGGGSGGGGSGGGGSGGGGSGGGGSGGGGSGGGGSGGGGS

SEQ ID NO: 113 - protein, 30 aa, Artificial Sequence
  Description of Artificial Sequence: Synthetic polypeptide
  MISC_FEATURE (1)..(30): This sequence may encompass 1-30 residues
GGGGGGGGGGGGGGGGGGGGGGGGGGGGGG

SEQ ID NO: 114 - protein, 150 aa, Artificial Sequence
  Description of Artificial Sequence: Synthetic polypeptide
  MISC_FEATURE (1)..(150): This sequence may encompass 1-30 "Glu Ala Ala Ala Lys" repeating units
EAAAKEAAAKEAAAKEAAAKEAAAKEAAAKEAAAKEAAAKEAAAKEAAAKEAAAKEAAAKEAAAKEAAAKEAAAKEAAAKEAAAKEAAAKEAAAKEAAAKEAAAKEAAAKEAAAKEAAAKEAAAKEAAAKEAAAKEAAAKEAAAKEAAAK

SEQ ID NO: 115 - protein, 90 aa, Artificial Sequence
  Description of Artificial Sequence: Synthetic polypeptide
  MISC_FEATURE (1)..(90): This sequence may encompass 1-30 "Gly Gly Ser" repeating units
GGSGGSGGSGGSGGSGGSGGSGGSGGSGGSGGSGGSGGSGGSGGSGGSGGSGGSGGSGGSGGSGGSGGSGGSGGSGGSGGSGGSGGSGGS

SEQ ID NO: 116 - protein, 16 aa, Artificial Sequence
  Description of Artificial Sequence: Synthetic peptide
SGSETPGTSESATPES

SEQ ID NO: 117 - protein, 60 aa, Artificial Sequence
  Description of Artificial Sequence: Synthetic polypeptide
  MOD_RES (1)..(1): Any amino acid
  MOD_RES (3)..(3): Any amino acid
  MOD_RES (5)..(5): Any amino acid
  MOD_RES (7)..(7): Any amino acid
  MOD_RES (9)..(9): Any amino acid
  MOD_RES (11)..(11): Any amino acid
  MOD_RES (13)..(13): Any amino acid
  MOD_RES (15)..(15): Any amino acid
  MOD_RES (17)..(17): Any amino acid
  MOD_RES (19)..(19): Any amino acid
  MOD_RES (21)..(21): Any amino acid
  MOD_RES (23)..(23): Any amino acid
  MOD_RES (25)..(25): Any amino acid
  MOD_RES (27)..(27): Any amino acid
  MOD_RES (29)..(29): Any amino acid
  MOD_RES (31)..(31): Any amino acid
  MOD_RES (33)..(33): Any amino acid
  MOD_RES (35)..(35): Any amino acid
  MOD_RES (37)..(37): Any amino acid
  MOD_RES (39)..(39): Any amino acid
  MOD_RES (41)..(41): Any amino acid
  MOD_RES (43)..(43): Any amino acid
  MOD_RES (45)..(45): Any amino acid
  MOD_RES (47)..(47): Any amino acid
  MOD_RES (49)..(49): Any amino acid
  MOD_RES (51)..(51): Any amino acid
  MOD_RES (53)..(53): Any amino acid
  MOD_RES (55)..(55): Any amino acid
  MOD_RES (57)..(57): Any amino acid
  MOD_RES (59)..(59): Any amino acid
  MISC_FEATURE (1)..(60): This sequence may encompass 1-30 "Xaa Pro" repeating units
XPXPXPXPXPXPXPXPXPXPXPXPXPXPXPXPXPXPXPXPXPXPXPXPXPXPXPXPXPXP

SEQ ID NO: 118 - protein, 24 aa, Artificial Sequence
  Description of Artificial Sequence: Synthetic peptide
SGGSSGSETPGTSESATPESSGGS

SEQ ID NO: 119 - protein, 32 aa, Artificial Sequence
  Description of Artificial Sequence: Synthetic polypeptide
SGGSSGGSSGSETPGTSESATPESSGGSSGGS

SEQ ID NO: 120 - protein, 104 aa, Artificial Sequence
  Description of Artificial Sequence: Synthetic polypeptide
GGSGGSPGSPAGSPTSTEEGTSESATPESGPGTSTEPSEGSAPGSPAGSPTSTEEGTSTEPSEGSAPGTSTEPSEGSAPGTSESATPESGPGSEPATSGGSGGS

SEQ ID NO: 121 - protein, 16 aa, Artificial Sequence
  Description of Artificial Sequence: Synthetic peptide
SGSETPGTSESATPES

SEQ ID NO: 122 - protein, 24 aa, Artificial Sequence
  Description of Artificial Sequence: Synthetic peptide
SGGSSGGSSGSETPGTSESATPES

SEQ ID NO: 123 - protein, 40 aa, Artificial Sequence
  Description of Artificial Sequence: Synthetic polypeptide
SGGSSGGSSGSETPGTSESATPESSGGSSGGSSGGSSGGS

SEQ ID NO: 124 - protein, 64 aa, Artificial Sequence
  Description of Artificial Sequence: Synthetic polypeptide
SGGSSGGSSGSETPGTSESATPESSGGSSGGSSGGSSGGSSGSETPGTSESATPESSGGSSGGS

SEQ ID NO: 125 - protein, 92 aa, Artificial Sequence
  Description of Artificial Sequence: Synthetic polypeptide
PGSPAGSPTSTEEGTSESATPESGPGTSTEPSEGSAPGSPAGSPTSTEEGTSTEPSEGSAPGTSTEPSEGSAPGTSESATPESGPGSEPATS

SEQ ID NO: 126 - protein, 716 aa, Homo sapiens
MPSTSFPVPSKFPLGPAAAVFGRGETLGPAPRAGGTMKSAEEEHYGYASSNVSPALPLPTAHSTLPAPCHNLQTSTPGIIPPADHPSGYGAALDGGPAGYFLSSGHTRPDGAPALESPRIEITSCLGLYHNNNQFFHDVEVEDVLPSSKRSPSTATLSLPSLEAYRDPSCLSPASSLSSRSCNSEASSYESNYSYPYASPQTSPWQSPCVSPKTTDPEEGFPRGLGACTLLGSPRHSPSTSPRASVTEESWLGARSSRPASPCNKRKYSLNGRQPPYSPHHSPTPSPHGSPRVSVTDDSWLGNTTQYTSSAIVAAINALTTDSSLDLGDGVPVKSRKTTLEQPPSVALKVEPVGEDLGSPPPPADFAPEDYSSFQHIRKGGFCDQYLAVPQHPYQWAKPKPLSPTSYMSPTLPALDWQLPSHSGPYELRIEVQPKSHHRAHYETEGSRGAVKASAGGHPIVQLHGYLENEPLMLQLFIGTADDRLLRPHAFYQVHRITGKTVSTTSHEAILSNTKVLEIPLLPENSMRAVIDCAGILKLRNSDIELRKGETDIGRKNTRVRLVFRVHVPQPSGRTLSLQVASNPIECSQRSAQELPLVEKQSTDSYPVVGGKKMVLSGHNFLQDSKVIFVEKAPDGHHVWEMEAKTDRDLCKPNSLVVEIPPFRNQRITSPVHVSFYVCNGKRKRSQYQRFTYLPANGNAIFLTVSREHERVGCFF

SEQ ID NO: 127 - DNA, 2978 bp, Homo sapiens
ggcgggcgctcggcgactcgtccccggggccccgcgcgggcccgggcagcaggggcgtgatgtcacggcagggagggggcgcgggagccgccgggccggcggggaggcgggggaggtgttttccagctttaaaaaggcaggaggcagagcgcggccctgcgtcagagcgagactcagaggctccgaactcgccggcggagtcgccgcgccagatcccagcagcagggcgcgggcaccggggcgcgggcagggctcggagccaccgcgcaggtcctagggccgcggccgggccccgccacgcgcgcacacgcccctcgatgactttcctccggggcgcgcggcgctgagcccggggcgagggctgtcttcccggagacccgaccccggcagcgcggggcggccgcttctcctgtgcctccgcccgccgctccactccccgccgccgccgcgcggatgccaagcaccagctttccagtcccttccaagtttccacttggccctgcggctgcggtcttcgggagaggagaaactttggggcccgcgccgcgcgccggcggcaccatgaagtcagcggaggaagaacactatggctatgcatcctccaacgtcagccccgccctgccgctccccacggcgcactccaccctgccggccccgtgccacaaccttcagacctccacaccgggcatcatcccgccggcggatcacccctcggggtacggagcagctttggacggtgggcccgcgggctacttcctctcctccggccacaccaggcctgatggggcccctgccctggagagtcctcgcatcgagataacctcgtgcttgggcctgtaccacaacaataaccagtttttccacgatgtggaggtggaagacgtcctccctagctccaaacggtccccctccacggccacgctgagtctgcccagcctggaggcctacagagacccctcgtgcctgagcccggccagcagcctgtcctcccggagctgcaactcagaggcctcctcctacgagtccaactactcgtacccgtacgcgtccccccagacgtcgccatggcagtctccctgcgtgtctcccaagaccacggaccccgaggagggctttccccgcgggctgggggcctgcacactgctgggttccccgcggcactccccctccacctcgccccgcgccagcgtcactgaggagagctggctgggtgcccgctcctccagacccgcgtccccttgcaacaagaggaagtacagcctcaacggccggcagccgccctactcaccccaccactcgcccacgccgtccccgcacggctccccgcgggtcagcgtgaccgacgactcgtggttgggcaacaccacccagtacaccagctcggccatcgtggccgccatcaacgcgctgaccaccgacagcagcctggacctgggagatggcgtccctgtcaagtcccgcaagaccaccctggagcagccgccctcagtggcgctcaaggtggagcccgtcggggaggacctgggcagccccccgcccccggccgacttcgcgcccgaagactactcctctttccagcacatcaggaagggcggcttctgcgaccagtacctggcggtgccgcagcacccctaccagtgggcgaagcccaagcccctgtcccctacgtcctacatgagcccgaccctgcccgccctggactggcagctgccgtcccactcaggcccgtatgagcttcggattgaggtgcagcccaagtcccaccaccgagcccactacgagacggagggcagccggggggccgtgaaggcgtcggccggaggacaccccatcgtgcagctgcatggctacttggagaatgagccgctgatgctgcagcttttcattgggacggcggacgaccgcctgctgcgcccgcacgccttctaccaggtgcaccgcatcacagggaagaccgtgtccaccaccagccacgaggccatcctctccaacaccaaagtcctggagatcccactcctgccggagaacagcatgcgagccgtcattgactgtgccggaatcctgaaactcagaaactccgacattgaacttcggaaaggagagacggacatcgggaggaagaacacacgggtacggctggtgttccgcgttcacgtcccgcaacccagcggccgcacgctgtccctgcaggtggcctccaaccccatcgaatgctcccagcgctcagctcaggagctgcctctggtggagaagcagagcacggacagctatccggtcgtgggcgggaagaagatggtcctgtctggccacaacttcctgcaggactccaaggtcattttcgtggagaaagccccagatggccaccatgtctgggagatggaagcgaaaactgaccgggacctgtgcaagccgaattctctggtggttgagatcccgccatttcggaatcagaggataaccagccccgttcacgtcagtttctacgtctgcaacgggaagagaaagcgaagccagtaccagcgtttcacctaccttcccgccaacggtaacgccatctttctaaccgtaagccgtgaacatgagcgcgtggggtgctttttctaaagacgcagaaacgacgtcgccgtaaagcagcgtggcgtgttgcacatttaactgtgtgatgtcccgttagtgagaccgagccatcgatgccctgaaaaggaaaggaaaagggaagcttcggatgcattttccttgatccctgttgggggtggggggcgggggttgcatactcagatagtcacggttattttgcttcttgcgaatgtataacagccaaggggaaaacatggctcttctgctccaaaaaactgagggggtcctggtgtgcatttgcaccctaaagctgcttacggtgaaaaggcaaataggtatagctattttgcaggcacctttaggaataaactttgcttttaagcctgtaaaaaaaaaaaaaa

SEQ ID NO: 128 - protein, 29 aa, Artificial Sequence
  Description of Artificial Sequence: Synthetic peptide
PKKKRKVEGADKRTADGSEFESPKKKRKV

SEQ ID NO: 129 - protein, 18 aa, Artificial Sequence
  Description of Artificial Sequence: Synthetic peptide
KRTADGSEFESPKKKRKV

SEQ ID NO: 130 - protein, 16 aa, Artificial Sequence
  Description of Artificial Sequence: Synthetic peptide
KRPAATKKAGQAKKKK

SEQ ID NO: 131 - protein, 17 aa, Artificial Sequence
  Description of Artificial Sequence: Synthetic peptide
KKTELQTTNAENKTKKL

SEQ ID NO: 132 - protein, 19 aa, Artificial Sequence
  Description of Artificial Sequence: Synthetic peptide
KRGINDRNFWRGENGRKTR

SEQ ID NO: 133 - protein, 16 aa, Artificial Sequence
  Description of Artificial Sequence: Synthetic peptide
RKSGKIAAIVVKRPRK

SEQ ID NO: 134 - protein, 7 aa, Artificial Sequence
  Description of Artificial Sequence: Synthetic peptide
PKKKRKV

SEQ ID NO: 135 - protein, 30 aa, Artificial Sequence
  Description of Artificial Sequence: Synthetic polypeptide
MDSLLMNRRKFLYQFKNVRWAKGRRETYLC

SEQ ID NO: 136 - protein, 288 aa, Homo sapiens
MQIPQAPWPVVWAVLQLGWRPGWFLDSPDRPWNPPTFSPALLVVTEGDNATFTCSFSNTSESFVLNWYRMSPSNQTDKLAAFPEDRSQPGQDCRFRVTQLPNGRDFHMSVVRARRNDSGTYLCGAISLAPKAQIKESLRAELRVTERRAEVPTAHPSPSPRPAGQFQTLVVGVVGGLLGSLVLLVWVLAVICSRAARGTIGARRTGQPLKEDPSAVPVFSVDYGELDFQWREKTPEPPVPCVPEQTEYATIVFPSGMGTSSPARRGSADGPRSAQPLRPEDGHCSWPL

SEQ ID NO: 137 - DNA, 867 bp, Homo sapiens
atgcagatcccacaggcgccctggccagtcgtctgggcggtgctacaactgggctggcggccaggatggttcttagactccccagacaggccctggaacccccccaccttctccccagccctgctcgtggtgaccgaaggggacaacgccaccttcacctgcagcttctccaacacatcggagagcttcgtgctaaactggtaccgcatgagccccagcaaccagacggacaagctggccgccttccccgaggaccgcagccagcccggccaggactgccgcttccgtgtcacacaactgcccaacgggcgtgacttccacatgagcgtggtcagggcccggcgcaatgacagcggcacctacctctgtggggccatctccctggcccccaaggcgcagatcaaagagagcctgcgggcagagctcagggtgacagagagaagggcagaagtgcccacagcccaccccagcccctcacccaggccagccggccagttccaaaccctggtggttggtgtcgtgggcggcctgctgggcagcctggtgctgctagtctgggtcctggccgtcatctgctcccgggccgcacgagggacaataggagccaggcgcaccggccagcccctgaaggaggacccctcagccgtgcctgtgttctctgtggactatggggagctggatttccagtggcgagagaagaccccggagccccccgtgccctgtgtccctgagcagacggagtatgccaccattgtctttcctagcggaatgggcacctcatcccccgcccgcaggggctcagctgacggccctcggagtgcccagccactgaggcctgaggatggacactgctcttggcccctctga

SEQ ID NO: 138 - protein, 2002 aa, Homo sapiens
MEQDRTNHVEGNRLSPFLIPSPPICQTEPLATKLQNGSPLPERAHPEVNGDTKWHSFKSYYGIPCMKGSQNSRVSPDFTQESRGYSKCLQNGGIKRTVSEPSLSGLLQIKKLKQDQKANGERRNFGVSQERNPGESSQPNVSDLSDKKESVSSVAQENAVKDFTSFSTHNCSGPENPELQILNEQEGKSANYHDKNIVLLKNKAVLMPNGATVSASSVEHTHGELLEKTLSQYYPDCVSIAVQKTTSHINAINSQATNELSCEITHPSHTSGQINSAQTSNSELPPKPAAVVSEACDADDADNASKLAAMLNTCSFQKPEQLQQQKSVFEICPSPAENNIQGTTKLASGEEFCSGSSSNLQAPGGSSERYLKQNEMNGAYFKQSSVFTKDSFSATTTPPPPSQLLLSPPPPLPQVPQLPSEGKSTLNGGVLEEHHHYPNQSNTTLLREVKIEGKPEAPPSQSPNPSTHVCSPSPMLSERPQNNCVNRNDIQTAGTMTVPLCSEKTRPMSEHLKHNPPIFGSSGELQDNCQQLMRNKEQEILKGRDKEQTRDLVPPTQHYLKPGWIELKAPRFHQAESHLKRNEASLPSILQYQPNLSNQMTSKQYTGNSNMPGGLPRQAYTQKTTQLEHKSQMYQVEMNQGQSQGTVDQHLQFQKPSHQVHFSKTDHLPKAHVQSLCGTRFHFQQRADSQTEKLMSPVLKQHLNQQASETEPFSNSHLLQHKPHKQAAQTQPSQSSHLPQNQQQQQKLQIKNKEEILQTFPHPQSNNDQQREGSFFGQTKVEECFHGENQYSKSSEFETHNVQMGLEEVQNINRRNSPYSQTMKSSACKIQVSCSNNTHLVSENKEQTTHPELFAGNKTQNLHHMQYFPNNVIPKQDLLHRCFQEQEQKSQQASVLQGYKNRNQDMSGQQAAQLAQQRYLIHNHANVFPVPDQGGSHTQTPPQKDTQKHAALRWHLLQKQEQQQTQQPQTESCHSQMHRPIKVEPGCKPHACMHTAPPENKTWKKVTKQENPPASCDNVQQKSIIETMEQHLKQFHAKSLFDHKALTLKSQKQVKVEMSGPVTVLTRQTTAAELDSHTPALEQQTTSSEKTPTKRTAASVLNNFIESPSKLLDTPIKNLLDTPVKTQYDFPSCRCVEQIIEKDEGPFYTHLGAGPNVAAIREIMEERFGQKGKAIRIERVIYTGKEGKSSQGCPIAKWVVRRSSSEEKLLCLVRERAGHTCEAAVIVILILVWEGIPLSLADKLYSELTETLRKYGTLTNRRCALNEERTCACQGLDPETCGASFSFGCSWSMYYNGCKFARSKIPRKFKLLGDDPKEEEKLESHLQNLSTLMAPTYKKLAPDAYNNQIEYEHRAPECRLGLKEGRPFSGVTACLDFCAHAHRDLHNMQNGSTLVCTLTREDNREFGGKPEDEQLHVLPLYKVSDVDEFGSVEAQEEKKRSGAIQVLSSFRRKVRMLAEPVKTCRQRKLEAKKAAAEKLSSLENSSNKNEKEKSAPSRTKQTENASQAKQLAELLRLSGPVMQQSQQPQPLQKQPPQPQQQQRPQQQQPHHPQTESVNSYSASGSTNPYMRRPNPVSPYPNSSHTSDIYGSTSPMNFYSTSSQAAGSYLNSSNPMNPYPGLLNQNTQYPSYQCNGNLSVDNCSPYLGSYSPQSQPMDLYRYPSQDPLSKLSLPPIHTLYQPRFGNSQSFTSKYLGYGNQNMQGDGFSSCTIRPNVHHVGKLPPYPTHEMDGHFMGATSRLPPNLSNPNMDYKNGEHHSPSHIIHNYSAAPGMFNSSLHALHLQNKENDMLSHTANGLSKMLPALNHDRTACVQGGLHKLSDANGQEKQPLALVQGVASGAEDNDEVWSDSEQSFLDPDIGGVAVAPTHGSILIECAKRELHATTPLKNPNRNHPTRISLVFYQHKSMNEPKHGLALWEAKMAEKAREKEEECEKYGPDYVPQKSHGKKVKREPAEPHETSEPTYLRFIKSLAERTMSVTTDSTVTTSPYAFTRVTGPYNRYI

SEQ ID NO: 139 - DNA, 10178 bp, Homo sapiens
ccgtgccatcccaacctcccacctcgcccccaaccttcgcgcttgctctgcttcttctcccaggggtggagacccgccgaggtccccggggttcccgagggctgcacccttccccgcgctcgccagccctggcccctactccgcgctggtccgggcgcaccactccccccgcgccactgcacggcgtgagggcagcccaggtctccactgcgcgccccgctgtacggccccaggtgccgccggcctttgtgctggacgcccggtgcggggggctaattccctgggagccggggctgagggccccagggcggcggcgcaggccggggcggagcgggaggaggccggggcggagcaggaggaggcccgggcggaggaggagagccggcggtagcggcagtggcagcggcgagagcttgggcggccgccgccgcctcctcgcgagcgccgcgcgcccgggtcccgctcgcatgcaagtcacgtccgccccctcggcgcggccgccccgagacgccggccccgctgagtgatgagaacagacgtcaaactgccttatgaatattgatgcggaggctaggctgctttcgtagagaagcagaaggaagcaagatggctgccctttaggatttgttagaaaggagacccgactgcaactgctggattgctgcaaggctgagggacgagaacgaggctggcaaacattcagcagcacaccctctcaagattgtttacttgcctttgctcctgttgagttacaacgcttggaagcaggagatgggctcagcagcagccaataggacatgatccaggaagagcaaattcaactagagggcagccttgtggatggccccgaagcaagcctgatggaacaggatagaaccaaccatgttgagggcaacagactaagtccattcctgataccatcacctcccatttgccagacagaacctctggctacaaagctccagaatggaagcccactgcctgagagagctcatccagaagtaaatggagacaccaagtggcactctttcaaaagttattatggaataccctgtatgaagggaagccagaatagtcgtgtgagtcctgactttacacaagaaagtagagggtattccaagtgtttgcaaaatggaggaataaaacgcacagttagtgaaccttctctctctgggctccttcagatcaagaaattgaaacaagaccaaaaggctaatggagaaagacgtaacttcggggtaagccaagaaagaaatccaggtgaaagcagtcaaccaaatgtctccgatttgagtgataagaaagaatctgtgagttctgtagcccaagaaaatgcagttaaagatttcaccagtttttcaacacataactgcagtgggcctgaaaatccagagcttcagattctgaatgagcaggaggggaaaagtgctaattaccatgacaagaacattgtattacttaaaaacaaggcagtgctaatgcctaatggtgctacagtttctgcctcttccgtggaacacacacatggtgaactcctggaaaaaacactgtctcaatattatccagattgtgtttccattgcggtgcagaaaaccacatctcacataaatgccattaacagtcaggctactaatgagttgtcctgtgagatcactcacccatcgcatacctcagggcagatcaattccgcacagacctctaactctgagctgcctccaaagccagctgcagtggtgagtgaggcctgtgatgctgatgatgctgataatgccagtaaactagctgcaatgctaaatacctgttcctttcagaaaccagaacaactacaacaacaaaaatcagtttttgagatatgcccatctcctgcagaaaataacatccagggaaccacaaagctagcgtctggtgaagaattctgttcaggttccagcagcaatttgcaagctcctggtggcagctctgaacggtatttaaaacaaaatgaaatgaatggtgcttacttcaagcaaagctcagtgttcactaaggattccttttctgccactaccacaccaccaccaccatcacaattgcttctttctccccctcctcctcttccacaggttcctcagcttccttcagaaggaaaaagcactctgaatggtggagttttagaagaacaccaccactaccccaaccaaagtaacacaacacttttaagggaagtgaaaatagagggtaaacctgaggcaccaccttcccagagtcctaatccatctacacatgtatgcagcccttctccgatgctttctgaaaggcctcagaataattgtgtgaacaggaatgacatacagactgcagggacaatgactgttccattgtgttctgagaaaacaagaccaatgtcagaacacctcaagcataacccaccaatttttggtagcagtggagagctacaggacaactgccagcagttgatgagaaacaaagagcaagagattctgaagggtcgagacaaggagcaaacacgagatcttgtgcccccaacacagcactatctgaaaccaggatggattgaattgaaggcccctcgttttcaccaagcggaatcccatctaaaacgtaatgaggcatcactgccatcaattcttcagtatcaacccaatctctccaatcaaatgacctccaaacaatacactggaaattccaacatgcctggggggctcccaaggcaagcttacacccagaaaacaacacagctggagcacaagtcacaaatgtaccaagttgaaatgaatcaagggcagtcccaaggtacagtggaccaacatctccagttccaaaaaccctcacaccaggtgcacttctccaaaacagaccatttaccaaaagctcatgtgcagtcactgtgtggcactagatttcattttcaacaaagagcagattcccaaactgaaaaacttatgtccccagtgttgaaacagcacttgaatcaacaggcttcagagactgagccattttcaaactcacaccttttgcaacataagcctcataaacaggcagcacaaacacaaccatcccagagttcacatctccctcaaaaccagcaacagcagcaaaaattacaaataaagaataaagaggaaatactccagacttttcctcacccccaaagcaacaatgatcagcaaagagaaggatcattctttggccagactaaagtggaagaatgttttcatggtgaaaatcagtattcaaaatcaagcgagttcgagactcataatgtccaaatgggactggaggaagtacagaatataaatcgtagaaattccccttatagtcagaccatgaaatcaagtgcatgcaaaatacaggtttcttgttcaaacaatacacacctagtttcagagaataaagaacagactacacatcctgaactttttgcaggaaacaagacccaaaacttgcatcacatgcaatattttccaaataatgtgatcccaaagcaagatcttcttcacaggtgctttcaagaacaggagcagaagtcacaacaagcttcagttctacagggatataaaaatagaaaccaagatatgtctggtcaacaagctgcgcaacttgctcagcaaaggtacttgatacataaccatgcaaatgtttttcctgtgcctgaccagggaggaagtcacactcagacccctccccagaaggacactcaaaagcatgctgctctaaggtggcatctcttacagaagcaagaacagcagcaaacacagcaaccccaaactgagtcttgccatagtcagatgcacaggccaattaaggtggaacctggatgcaagccacatgcctgtatgcacacagcaccaccagaaaacaaaacatggaaaaaggtaactaagcaagagaatccacctgcaagctgtgataatgtgcagcaaaagagcatcattgagaccatggagcagcatctgaagcagtttcacgccaagtcgttatttgaccataaggctcttactctcaaatcacagaagcaagtaaaagttgaaatgtcagggccagtcacagttttgactagacaaaccactgctgcagaacttgatagccacaccccagctttagagcagcaaacaacttcttcagaaaagacaccaaccaaaagaacagctgcttctgttctcaataattttatagagtcaccttccaaattactagatactcctataaaaaatttattggatacacctgtcaagactcaatatgatttcccatcttgcagatgtgtagagcaaattattgaaaaagatgaaggtcctttttatacccatctaggagcaggtcctaatgtggcagctattagagaaatcatggaagaaaggtttggacagaagggtaaagctattaggattgaaagagtcatctatactggtaaagaaggcaaaagttctcagggatgtcctattgctaagtgggtggttcgcagaagcagcagtgaagagaagctactgtgtttggtgcgggagcgagctggccacacctgtgaggctgcagtgattgtgattctcatcctggtgtgggaaggaatcccgctgtctctggctgacaaactctactcggagcttaccgagacgctgaggaaatacggcacgctcaccaatcgccggtgtgccttgaatgaagagagaacttgcgcctgtcaggggctggatccagaaacctgtggtgcctccttctcttttggttgttcatggagcatgtactacaatggatgtaagtttgccagaagcaagatcccaaggaagtttaagctgcttggggatgacccaaaagaggaagagaaactggagtctcatttgcaaaacctgtccactcttatggcaccaacatataagaaacttgcacctgatgcatataataatcagattgaatatgaacacagagcaccagagtgccgtctgggtctgaaggaaggccgtccattctcaggggtcactgcatgtttggacttctgtgctcatgcccacagagacttgcacaacatgcagaatggcagcacattggtatgcactctcactagagaagacaatcgagaatttggaggaaaacctgaggatgagcagcttcacgttctgcctttatacaaagtctctgacgtggatgagtttgggagtgtggaagctcaggaggagaaaaaacggagtggtgccattcaggtactgagttcttttcggcgaaaagtcaggatgttagcagagccagtcaagacttgccgacaaaggaaactagaagccaagaaagctgcagctgaaaagctttcctccctggagaacagctcaaataaaaatgaaaaggaaaagtcagccccatcacgtacaaaacaaactgaaaacgcaagccaggctaaacagttggcagaacttttgcgactttcaggaccagtcatgcagcagtcccagcagccccagcctctacagaagcagccaccacagccccagcagcagcagagaccccagcagcagcagccacatcaccctcagacagagtctgtcaactcttattctgcttctggatccaccaatccatacatgagacggcccaatccagttagtccttatccaaactcttcacacacttcagatatctatggaagcaccagccctatgaacttctattccacctcatctcaagctgcaggttcatatttgaattcttctaatcccatgaacccttaccctgggcttttgaatcagaatacccaatatccatcatatcaatgcaatggaaacctatcagtggacaactgctccccatatctgggttcctattctccccagtctcagccgatggatctgtataggtatccaagccaagaccctctgtctaagctcagtctaccacccatccatacactttaccagccaaggtttggaaatagccagagttttacatctaaatacttaggttatggaaaccaaaatatgcagggagatggtttcagcagttgtaccattagaccaaatgtacatcatgtagggaaattgcctccttatcccactcatgagatggatggccacttcatgggagccacctctagattaccacccaatctgagcaatccaaacatggactataaaaatggtgaacatcattcaccttctcacataatccataactacagtgcagctccgggcatgttcaacagctctcttcatgccctgcatctccaaaacaaggagaatgacatgctttcccacacagctaatgggttatcaaagatgcttccagctcttaaccatgatagaactgcttgtgtccaaggaggcttacacaaattaagtgatgctaatggtcaggaaaagcagccattggcactagtccagggtgtggcttctggtgcagaggacaacgatgaggtctggtcagacagcgagcagagctttctggatcctgacattgggggagtggccgtggctccaactcatgggtcaattctcattgagtgtgcaaagcgtgagctgcatgccacaacccctttaaagaatcccaataggaatcaccccaccaggatctccctcgtcttttaccagcataagagcatgaatgagccaaaacatggcttggctctttgggaagccaaaatggctgaaaaagcccgtgagaaagaggaagagtgtgaaaagtatggcccagactatgtgcctcagaaatcccatggcaaaaaagtgaaacgggagcctgctgagccacatgaaacttcagagcccacttacctgcgtttcatcaagtctcttgccgaaaggaccatgtccgtgaccacagactccacagtaactacatctccatatgccttcactcgggtcacagggccttacaacagatatatatgaagatatatatgatatcacccccttttgttggttacctcacttgaaaagaccacaaccaacctgtcagtagtatagttctcatgacgtgggcagtggggaaaggtcacagtattcatgacaaatgtggtgggaaaaacctcagctcaccagcaacaaaagaggttatcttaccatagcacttaattttcactggctcccaagtggtcacagatggcatctaggaaaagaccaaagcattctatgcaaaaagaaggtggggaagaaagtgttccgcaatttacatttttaaacactggttctattattggacgagatgatatgtaaatgtgatcccccccccccgcttacaactctacacatctgtgaccacttttaataatatcaagtttgcatagtcatggaacacaaatcaaacaagtactgtagtattacagtgacaggaatcttaaaataccatctggtgctgaatatatgatgtactgaaatactggaattatggctttttgaaatgcagtttttactgtaatcttaacttttatttatcaaaatagctacaggaaacatgaatagcaggaaaacactgaatttgtttggatgttctaagaaatggtgctaagaaaatggtgtctttaatagctaaaaatttaatgcctttatatcatcaagatgctatcagtgtactccagtgcccttgaataataggggtaccttttcattcaagtttttatcataattacctattcttacacaagcttagtttttaaaatgtggacattttaaaggcctctggattttgctcatccagtgaagtccttgtaggacaataaacgtatatatgtacatatatacacaaacatgtatatgtgcacacacatgtatatgtataaatattttaaatggtgttttagaagcactttgtctacctaagctttgacaacttgaacaatgctaaggtactgagatgtttaaaaaacaagtttactttcattttagaatgcaaagttgatttttttaaggaaacaaagaaagcttttaaaatatttttgcttttagccatgcatctgctgatgagcaattgtgtccatttttaacacagccagttaaatccaccatggggcttactggattcaagggaatacgttagtccacaaaacatgttttctggtgctcatctcacatgctatactgtaaaacagttttatacaaaattgtatgacaagttcattgctcaaaaatgtacagttttaagaattttctattaactgcaggtaataattagctgcatgctgcagactcaacaaagctagttcactgaagcctatgctattttatggatcataggctcttcagagaactgaatggcagtctgcctttgtgttgataattatgtacattgtgacgttgtcatttcttagcttaagtgtcctctttaacaagaggattgagcagactgatgcctgcataagatgaataaacagggttagttccatgtgaatctgtcagttaaaaagaaacaaaaacaggcagctggtttgctgtggtggttttaaatcattaatttgtataaagaagtgaaagagttgtatagtaaattaaattgtaaacaaaacttttttaatgcaatgctttagtattttagtactgtaaaaaaattaaatatatacatatatatatatatatatatatatatatatatgagtttgaagcagaattcacatcatgatggtgctactcagcctgctacaaatatatcataatgtgagctaagaattcattaaatgtttgagtgatgttcctacttgtcatatacctcaacactagtttggcaataggatattgaactgagagtgaaagcattgtgtaccatcatttttttccaagtccttttttttattgttaaaaaaaaaagcataccttttttcaatacttgatttcttagcaagtataacttgaacttcaacctttttgttctaaaaattcagggatatttcagctcatgctctccctatgccaacatgtcacctgtgtttatgtaaaattgttgtaggttaataaatatattctttgtcagggatttaacccttttattttgaatcccttctattttacttgtacatgtgctgatgtaactaaaactaattttgtaaatctgttggctctttttattgtaaagaaaagcattttaaaagtttgaggaatcttttgactgtttcaagcaggaaaaaaaaattacatgaaaatagaatgcactgagttgataaagggaaaaattgtaaggcaggagtttggcaagtggctgttggccagagacttacttgtaactctctaaatgaagtttttttgatcctgtaatcactgaaggtacatactccatgtggacttcccttaaacaggcaaacacctacaggtatggtgtgcaacagattgtacaattacattttggcctaaatacatttttgcttactagtatttaaaataaattcttaatcagaggaggcctttgggttttattggtcaaatctttgtaagctggcttttgtctttttaaaaaatttcttgaatttgtggttgtgtccaatttgcaaacatttccaaaaatgtttgctttgcttacaaaccacatgattttaatgttttttgtataccataatatctagccccaaacatttgattactacatgtgcattggtgattttgatcatccattcttaatatttgatttctgtgtcacctactgtcatttgttaaactgctggccaacaagaacaggaagtatagtttggggggttggggagagtttacataaggaagagaagaaattgagtggcatattgtaaatatcagatctataattgtaaatataaaacctgcctcagttagaatgaatggaaagcagatctacaatttgctaatataggaatatcaggttgactatatagccatacttgaaaatgcttctgagtggtgtcaactttacttgaatgaatttttcatcttgattgacgcacagtgatgtacagttcacttctgaagctagtggttaacttgtgtaggaaacttttgcagtttgacactaagataacttctgtgtgcatttttctatgcttttttaaaaactagtttcatttcattttcatgagatgtttggtttataagatctgaggatggttataaatactgtaagtattgtaatgttatgaatgcaggttatttgaaagctgtttattattatatcattcctgataatgctatgtgagtgtttttaataaaatttatatttatttaatgcactctaagtgttgtcttcct

SEQ ID NO: 140 - protein, 567 aa, Homo sapiens
MGRGLLRGLWPLHIVLWTRIASTIPPHVQKSVNNDMIVTDNNGAVKFPQLCKFCDVRFSTCDNQKSCMSNCSITSICEKPQEVCVAVWRKNDENITLETVCHDPKLPYHDFILEDAASPKCIMKEKKKPGETFFMCSCSSDECNDNIIFSEEYNTSNPDLLLVIFQVTGISLLPPLGVAISVIIIFYCYRVNRQQKLSSTWETGKTRKLMEFSEHCAIILEDDRSDISSTCANNINHNTELLPIELDTLVGKGRFAEVYKAKLKQNTSEQFETVAVKIFPYEEYASWKTEKDIFSDINLKHENILQFLTAEERKTELGKQYWLITAFHAKGNLQEYLTRHVISWEDLRKLGSSLARGIAHLHSDHTPCGRPKMPIVHRDLKSSNILVKNDLTCCLCDFGLSLRLDPTLSVDDLANSGQVGTARYMAPEVLESRMNLENVESFKQTDVYSMALVLWEMTSRCNAVGEVKDYEPPFGSKVREHPCVESMKDNVLRDRGRPEIPSFWLNHQGIQMVCETLTECWDHDPEARLTAQCVAERFSELEHLDRLSGRSCSEEKIPEDGSLNTTK

SEQ ID NO: 141 - DNA, 2090 bp, Homo sapiens
gttggcgaggagtttcctgtttcccccgcagcgctgagttgaagttgagtgagtcactcgcgcgcacggagcgacgacacccccgcgcgtgcacccgctcgggacaggagccggactcctgtgcagcttccctcggccgccgggggcctccccgcgcctcgccggcctccaggcccctcctggctggcgagcgggcgccacatctggcccgcacatctgcgctgccggcccggcgcggggtccggagagggcgcggcgcggagcgcagccaggggtccgggaaggcgccgtccgtgcgctgggggctcggtctatgacgagcagcggggtctgccatgggtcgggggctgctcaggggcctgtggccgctgcacatcgtcctgtggacgcgtatcgccagcacgatcccaccgcacgttcagaagtcggttaataacgacatgatagtcactgacaacaacggtgcagtcaagtttccacaactgtgtaaattttgtgatgtgagattttccacctgtgacaaccagaaatcctgcatgagcaactgcagcatcacctccatctgtgagaagccacaggaagtctgtgtggctgtatggagaaagaatgacgagaacataacactagagacagtttgccatgaccccaagctcccctaccatgactttattctggaagatgctgcttctccaaagtgcattatgaaggaaaaaaaaaagcctggtgagactttcttcatgtgttcctgtagctctgatgagtgcaatgacaacatcatcttctcagaagaatataacaccagcaatcctgacttgttgctagtcatatttcaagtgacaggcatcagcctcctgccaccactgggagttgccatatctgtcatcatcatcttctactgctaccgcgttaaccggcagcagaagctgagttcaacctgggaaaccggcaagacgcggaagctcatggagttcagcgagcactgtgccatcatcctggaagatgaccgctctgacatcagctccacgtgtgccaacaacatcaaccacaacacagagctgctgcccattgagctggacaccctggtggggaaaggtcgctttgctgaggtctataaggccaagctgaagcagaacacttcagagcagtttgagacagtggcagtcaagatctttccctatgaggagtatgcctcttggaagacagagaaggacatcttctcagacatcaatctgaagcatgagaacatactccagttcctgacggctgaggagcggaagacggagttggggaaacaatactggctgatcaccgccttccacgccaagggcaacctacaggagtacctgacgcggcatgtcatcagctgggaggacctgcgcaagctgggcagctccctcgcccgggggattgctcacctccacagtgatcacactccatgtgggaggcccaagatgcccatcgtgcacagggacctcaagagctccaatatcctcgtgaagaacgacctaacctgctgcctgtgtgactttgggctttccctgcgtctggaccctactctgtctgtggatgacctggctaacagtgggcaggtgggaactgcaagatacatggctccagaagtcctagaatccaggatgaatttggagaatgctgagtccttcaagcagaccgatgtctactccatggctctggtgctctgggaaatgacatctcgctgtaatgcagtgggagaagtaaaagattatgagcctccatttggttccaaggtgcgggagcacccctgtgtcgaaagcatgaaggacaacgtgttgagagatcgagggcgaccagaaattcccagcttctggctcaaccaccagggcatccagatggtgtgtgagacgttgactgagtgctgggaccacgacccagaggcccgtctcacagcccagtgtgtggcagaacgcttcagtgagctggagcatctggacaggctctcggggaggagctgctcggaggagaagattcctgaagacggctccctaaacactaccaaatagctcttatggggcaggctgggcatgtccaaagaggctgcccctctcaccaaa

SEQ ID NO: 142 - protein, 244 aa, Homo sapiens
MRWCLLLIWAQGLRQAPLASGMMTGTIETTGNISAEKGGSIILQCHLSSTTAQVTQVNWEQQDQLLAICNADLGWHISPSFKDRVAPGPGLGLTLQSLTVNDTGEYFCIYHTYPDGTYTGRIFLEVLESSVAEHGARFQIPLLGAMAATLVVICTAVIVVVALTRKKKALRIHSVEGDLRRKSAGQEEWSPSAPSPPGSCVQAEAAPAGLCGEQRGEDCAELHDYFNVLSYRSLGNCSFFTETG

SEQ ID NO: 143 - DNA, 831 bp, Homo sapiens
cgtcctatctgcagtcggctactttcagtggcagaagaggccacatctgcttcctgtaggccctctgggcagaagcatgcgctggtgtctcctcctgatctgggcccaggggctgaggcaggctcccctcgcctcaggaatgatgacaggcacaatagaaacaacggggaacatttctgcagagaaaggtggctctatcatcttacaatgtcacctctcctccaccacggcacaagtgacccaggtcaactgggagcagcaggaccagcttctggccatttgtaatgctgacttggggtggcacatctccccatccttcaaggatcgagtggccccaggtcccggcctgggcctcaccctccagtcgctgaccgtgaacgatacaggggagtacttctgcatctatcacacctaccctgatgggacgtacactgggagaatcttcctggaggtcctagaaagctcagtggctgagcacggtgccaggttccagattccattgcttggagccatggccgcgacgctggtggtcatctgcacagcagtcatcgtggtggtcgcgttgactagaaagaagaaagccctcagaatccattctgtggaaggtgacctcaggagaaaatcagctggacaggaggaatggagccccagtgctccctcacccccaggaagctgtgtccaggcagaagctgcacctgctgggctctgtggagagcagcggggagaggactgtgccgagctgcatgactacttcaatgtcctgagttacagaagcctgggtaactgcagcttcttcacagagactggttagcaaccagaggcatcttctgg

SEQ ID NO: 144 - protein, 140 aa, Homo sapiens
IQNPDPAVYQLRDSKSSDKSVCLFTDFDSQTNVSQSKDSDVYITDKTVLDMRSMDFKSNSAVAWSNKSDFACANAFNNSIIPEDTFFPSPESSCDVKLVEKSFETDTNLNFQNLSVIGFRILLLKVAGFNLLMTLRLWSS

SEQ ID NO: 145 - DNA, 5651 bp, Homo sapiens
catgctaatcctccggcaaacctctgtttcctcctcaaaaggcaggaggtcggaaagaataaacaatgagagtcacattaaaaacacaaaatcctacggaaatactgaagaatgagtctcagcactaaggaaaagcctccagcagctcctgctttctgagggtgaaggatagacgctgtggctctgcatgactcactagcactctatcacggccatattctggcagggtcagtggctccaactaacatttgtttggtactttacagtttattaaatagatgtttatatggagaagctctcatttctttctcagaagagcctggctaggaaggtggatgaggcaccatattcattttgcaggtgaaattcctgagatgtaaggagctgctgtgacttgctcaaggccttatatcgagtaaacggtagtgctggggcttagacgcaggtgttctgatttatagttcaaaacctctatcaatgagagagcaatctcctggtaatgtgatagatttcccaacttaatgccaacataccataaacctcccattctgctaatgcccagcctaagttggggagaccactccagattccaagatgtacagtttgctttgctgggcctttttcccatgcctgcctttactctgccagagttatattgctggggttttgaagaagatcctattaaataaaagaataagcagtattattaagtagccctgcatttcaggtttccttgagtggcaggccaggcctggccgtgaacgttcactgaaatcatggcctcttggccaagattgatagcttgtgcctgtccctgagtcccagtccatcacgagcagctggtttctaagatgctatttcccgtataaagcatgagaccgtgacttgccagccccacagagccccgcccttgtccatcactggcatctggactccagcctgggttggggcaaagagggaaatgagatcatgtcctaaccctgatcctcttgtcccacagatatccagaaccctgaccctgccgtgtaccagctgagagactctaaatccagtgacaagtctgtctgcctattcaccgattttgattctcaaacaaatgtgtcacaaagtaaggattctgatgtgtatatcacagacaaaactgtgctagacatgaggtctatggacttcaagagcaacagtgctgtggcctggagcaacaaatctgactttgcatgtgcaaacgccttcaacaacagcattattccagaagacaccttcttccccagcccaggtaagggcagctttggtgccttcgcaggctgtttccttgcttcaggaatggccaggttctgcccagagctctggtcaatgatgtctaaaactcctctgattggtggtctcggccttatccattgccaccaaaaccctctttttactaagaaacagtgagccttgttctggcagtccagagaatgacacgggaaaaaagcagatgaagagaaggtggcaggagagggcacgtggcccagcctcagtctctccaactgagttcctgcctgcctgcctttgctcagactgtttgccccttactgctcttctaggcctcattctaagccccttctccaagttgcctctccttatttctccctgtctgccaaaaaatctttcccagctcactaagtcagtctcacgcagtcactcattaacccaccaatcactgattgtgccggcacatgaatgcaccaggtgttgaagtggaggaattaaaaagtcagatgaggggtgtgcccagaggaagcaccattctagttgggggagcccatctgtcagctgggaaaagtccaaataacttcagattggaatgtgttttaactcagggttgagaaaacagctaccttcaggacaaaagtcagggaagggctctctgaagaaatgctacttgaagataccagccctaccaagggcagggagaggaccctatagaggcctgggacaggagctcaatgagaaaggagaagagcagcaggcatgagttgaatgaaggaggcagggccgggtcacagggccttctaggccatgagagggtagacagtattctaaggacgccagaaagctgttgatcggcttcaagcaggggagggacacctaatttgcttttcttttttttttttttttttttttttttttttgagatggagttttgctcttgttgcccaggctggagtgcaatggtgcatcttggctcactgcaacctccgcctcccaggttcaagtgattctcctgcctcagcctcccgagtagctgagattacaggcacccgccaccatgcctggctaattttttgtatttttagtagagacagggtttcactatgttggccaggctggtctcgaactcctgacctcaggtgatccacccgcttcagcctcccaaagtgctgggattacaggcgtgagccaccacacccggcctgcttttcttaaagatcaatctgagtgctgtacggagagtgggttgtaagccaagagtagaagcagaaagggagcagttgcagcagagagatgatggaggcctgggcagggtggtggcagggaggtaaccaacaccattcaggtttcaaaggtagaaccatgcagggatgagaaagcaaagaggggatcaaggaaggcagctggattttggcctgagcagctgagtcaatgatagtgccgtttactaagaagaaaccaaggaaaaaatttggggtgcagggatcaaaactttttggaacatatgaaagtacgtgtttatactctttatggcccttgtcactatgtatgcctcgctgcctccattggactctagaatgaagccaggcaagagcagggtctatgtgtgatggcacatgtggccagggtcatgcaacatgtactttgtacaaacagtgtatattgagtaaatagaaatggtgtccaggagccgaggtatcggtcctgccagggccaggggctctccctagcaggtgctcatatgctgtaagttccctccagatctctccacaaggaggcatggaaaggctgtagttgttcacctgcccaagaactaggaggtctggggtgggagagtcagcctgctctggatgctgaaagaatgtctgtttttccttttagaaagttcctgtgatgtcaagctggtcgagaaaagctttgaaacaggtaagacaggggtctagcctgggtttgcacaggattgcggaagtgatgaacccgcaataaccctgcctggatgagggagtgggaagaaattagtagatgtgggaatgaatgatgaggaatggaaacagcggttcaagacctgcccagagctgggtggggtctctcctgaatccctctcaccatctctgactttccattctaagcactttgaggatgagtttctagcttcaatagaccaaggactctctcctaggcctctgtattcctttcaacagctccactgtcaagagagccagagagagcttctgggtggcccagctgtgaaatttctgagtcccttagggatagccctaaacgaaccagatcatcctgaggacagccaagaggttttgccttctttcaagacaagcaacagtactcacataggctgtgggcaatggtcctgtctctcaagaatcccctgccactcctcacacccaccctgggcccatattcatttccatttgagttgttcttattgagtcatccttcctgtggtagcggaactcactaaggggcccatctggacccgaggtattgtgatgataaattctgagcacctaccccatccccagaagggctcagaaataaaataagagccaagtctagtcggtgtttcctgtcttgaaacacaatactgttggccctggaagaatgcacagaatctgtttgtaaggggatatgcacagaagctgcaagggacaggaggtgcaggagctgcaggcctcccccacccagcctgctctgccttggggaaaaccgtgggtgtgtcctgcaggccatgcaggcctgggacatgcaagcccataaccgctgtggcctcttggttttacagatacgaacctaaactttcaaaacctgtcagtgattgggttccgaatcctcctcctgaaagtggccgggtttaatctgctcatgacgctgcggctgtggtccagctgaggtgaggggccttgaagctgggagtggggtttagggacgcgggtctctgggtgcatcctaagctctgagagcaaacctccctgcagggtcttgcttttaagtccaaagcctgagcccaccaaactctcctacttcttcctgttacaaattcctcttgtgcaataataatggcctgaaacgctgtaaaatatcctcatttcagccgcctcagttgcacttctcccctatgaggtaggaagaacagttgtttagaaacgaagaaactgaggccccacagctaatgagtggaggaagagagacacttgtgtacaccacatgccttgtgttgtacttctctcaccgtgtaacctcctcatgtcctctctccccagtacggctctcttagctcagtagaaagaagacattacactcatattacaccccaatcctggctagagtctccgcaccctcctcccccagggtccccagtcgtcttgctgacaactgcatcctgttccatcaccatcaaaaaaaaactccaggctgggtgcgggggctcacacctgtaatcccagcactttgggaggcagaggcaggaggagcacaggagctggagaccagcctgggcaacacagggagaccccgcctctacaaaaagtgaaaaaattaaccaggtgtggtgctgcacacctgtagtcccagctacttaagaggctgagatgggaggatcgcttgagccctggaatgttgaggctacaatgagctgtgattgcgtcactgcactccagcctggaagacaaagcaagatcctgtctcaaataataaaaaaaataagaactccagggtacatttgctcctagaactctaccacatagccccaaacagagccatcaccatcacatccctaacagtcctgggtcttcctcagtgtccagcctgacttctgttcttcctcattccagatctgcaagattgtaagacagcctgtgctccctcgctccttcctctgcattgcccctcttctccctctccaaacagagggaactctcctacccccaaggaggtgaaagctgctaccacctctgtgcccccccggcaatgccaccaactggatcctacccgaatttatgattaagattgctgaagagctgccaaacactgctgccaccccctctgttcccttattgctgcttgtcactgcctgacattcacggcagaggcaaggctgctgcagcctcccctggctgtgcacattccctcctgctccccagagactgcctccgccatcccacagatgatggatcttcagtgggttctcttgggctctaggtcctgcagaatgttgtgaggggtttatttttttttaatagtgttcataaagaaatacatagtattcttcttctcaagacgtggggggaaattatctcattatcgaggccctgctatgctgtgtatctgggcgtgttgtatgtcctgctgccgatgccttcattaaaatgatttggaagagcaga

SEQ ID NO: 146 - DNA, 1508 bp, Homo sapiens
ttttgaaacccttcaaaggcagagacttgtccagcctaacctgcctgctgctcctagctcctgaggctcagggcccttggcttctgtccgctctgctcagggccctccagcgtggccactgctcagccatgctcctgctgctcgtcccagtgctcgaggtgatttttaccctgggaggaaccagagcccagtcggtgacccagcttggcagccacgtctctgtctctgaaggagccctggttctgctgaggtgcaactactcatcgtctgttccaccatatctcttctggtatgtgcaataccccaaccaaggactccagcttctcctgaagtacacatcagcggccaccctggttaaaggcatcaacggttttgaggctgaatttaagaagagtgaaacctccttccacctgacgaaaccctcagcccatatgagcgacgcggctgagtacttctgtgctgtgagtgatctcgaaccgaacagcagtgcttccaagataatctttggatcagggaccagactcagcatccggccaaatatccagaaccctgaccctgccgtgtaccagctgagagactctaaatccagtgacaagtctgtctgcctattcaccgattttgattctcaaacaaatgtgtcacaaagtaaggattctgatgtgtatatcacagacaaaactgtgctagacatgaggtctatggacttcaagagcaacagtgctgtggcctggagcaacaaatctgactttgcatgtgcaaacgccttcaacaacagcattattccagaagacaccttcttccccagcccagaaagttcctgtgatgtcaagctggtcgagaaaagctttgaaacagatacgaacctaaactttcaaaacctgtcagtgattgggttccgaatcctcctcctgaaagtggccgggtttaatctgctcatgacgctgcggctgtggtccagctgagatctgcaagattgtaagacagcctgtgctccctcgctccttcctctgcattgcccctcttctccctctccaaacagagggaactctcctacccccaaggaggtgaaagctgctaccacctctgtgcccccccggtaatgccaccaactggatcctacccgaatttatgattaagattgctgaagagctgccaaacactgctgccaccccctctgttcccttattgctgcttgtcactgcctgacattcacggcagaggcaaggctgctgcagcctcccctggctgtgcacattccctcctgctccccagagactgcctccgccatcccacagatgatggatcttcagtgggttctcttgggctctaggtcctggagaatgttgtgaggggtttatttttttttaatagtgttcataaagaaatacatagtattcttcttctcaagacgtggggggaaattatctcattatcgaggccctgctatgctgtgtgtctgggcgtgttgtatgtcctgctgccgatgccttcattaaaatgatttggaa

SEQ ID NO: 147 - protein, 176 aa, Homo sapiens
DLNKVFPPEVAVFEPSEAEISHTQKATLVCLATGFFPDHVELSWWVNGKEVHSGVSTDPQPLKEQPALNDSRYCLSSRLRVSATFWQNPRNHFRCQVQFYGLSENDEWTQDRAKPVTQIVSAEAWGRADCGFTSVSYQQGVLSATILYEILLGKATLYAVLVSALVLMAMVKRKDF

SEQ ID NO: 148 - DNA, 1151 bp, Homo sapiens
ctggtctagaatattccacatctgctctcactctgccatggactcctggaccttctgctgtgtgtccctttgcatcctggtagcgaagcatacagatgctggagttatccagtcaccccgccatgaggtgacagagatgggacaagaagtgactctgagatgtaaaccaatttcaggccacaactcccttttctggtacagacagaccatgatgcggggactggagttgctcatttactttaacaacaacgttccgatagatgattcagggatgcccgaggatcgattctcagctaagatgcctaatgcatcattctccactctgaagatccagccctcagaacccagggactcagctgtgtacttctgtgccagcagtttctcgacctgttcggctaactatggctacaccttcggttcggggaccaggttaaccgttgtagaggacctgaacaaggtgttcccacccgaggtcgctgtgtttgagccatcagaagcagagatctcccacacccaaaaggccacactggtgtgcctggccacaggcttcttccccgaccacgtggagctgagctggtgggtgaatgggaaggaggtgcacagtggggtcagcacagacccgcagcccctcaaggagcagcccgccctcaatgactccagatactgcctgagcagccgcctgagggtctcggccaccttctggcagaacccccgcaaccacttccgctgtcaagtccagttctacgggctctcggagaatgacgagtggacccaggatagggccaaacccgtcacccagatcgtcagcgccgaggcctggggtagagcagactgtggctttacctcggtgtcctaccagcaaggggtcctgtctgccaccatcctctatgagatcctgctagggaaggccaccctgtatgctgtgctggtcagcgcccttgtgttgatggccatggtcaagagaaaggatttctgaaggcagccctggaagtggagttaggagcttctaacccgtcatggttcaatacacattcttcttttgccagcgcttctgaagagctgctctcacctctctgcatcccaatagatatccccctatgtgcatgcacacctgcacactcacggctgaaatctccctaacccagggggac

SEQ ID NO: 149 - protein, 178 aa, Homo sapiens
DLKNVFPPKVAVFEPSEAEISHTQKATLVCLATGFYPDHVELSWWVNGKEVHSGVSTDPQPLKEQPALNDSRYCLSSRLRVSATFWQNPRNHFRCQVQFYGLSENDEWTQDRAKPVTQIVSAEAWGRADCGFTSESYQQGVLSATILYEILLGKATLYAVLVSALVLMAMVKRKDSRG

SEQ ID NO: 150 - DNA, 1489 bp, Homo sapiens
aggacctgaaaaacgtgttcccacccgaggtcgctgtgtttgagccatcagaagcagagatctcccacacccaaaaggccacactggtatgcctggccacaggcttctaccccgaccacgtggagctgagctggtgggtgaatgggaaggaggtgcacagtggggtcagcacagacccgcagcccctcaaggagcagcccgccctcaatgactccagatactgcctgagcagccgcctgagggtctcggccaccttctggcagaacccccgcaaccacttccgctgtcaagtccagttctacgggctctcggagaatgacgagtggacccaggatagggccaaacccgtcacccagatcgtcagcgccgaggcctggggtagagcaggtgagtggggcctggggagatgcctggaggagattaggtgagaccagctaccagggaaaatggaaagatccaggtagcggacaagactagatccagaagaaagccagagtggacaaggtgggatgatcaaggttcacagggtcagcaaagcacggtgtgcacttcccccaccaagaagcatagaggctgaatggagcacctcaagctcattcttccttcagatcctgacaccttagagctaagctttcaagtctccctgaggaccagccatacagctcagcatctgagtggtgtgcatcccattctcttctggggtcctggtttcctaagatcatagtgaccacttcgctggcactggagcagcatgagggagacagaaccagggctatcaaaggaggctgactttgtactatctgatatgcatgtgtttgtggcctgtgagtctgtgatgtaaggctcaatgtccttacaaagcagcattctctcatccatttttcttcccctgttttctttcagactgtggcttcacctccggtaagtgagtctctcctttttctctctatctttcgccgtctctgctctcgaaccagggcatggagaatccacggacacaggggcgtgagggaggccagagccacctgtgcacaggtgcctacatgctctgttcttgtcaacagagtcttaccagcaaggggtcctgtctgccaccatcctctatgagatcttgctagggaaggccaccttgtatgccgtgctggtcagtgccctcgtgctgatggccatggtaaggaggagggtgggatagggcagatgatgggggcaggggatggaacatcacacatgggcataaaggaatctcagagccagagcacagcctaatatatcctatcacctcaatgaaaccataatgaagccagactggggagaaaatgcagggaatatcacagaatgcatcatgggaggatggagacaaccagcgagccctactcaaattaggcctcagagcccgcctcccctgccctactcctgctgtgccatagcccctgaaaccctgaaaatgttctctcttccacaggtcaagagaaaggattccagaggctag

SEQ ID NO: 151 - protein, 84 aa, Bacillus phage PBS2
MTNLSDIIEKETGKQLVIQESILMLPEEVEEVIGNKPESDILVHTAYDESTDENVMLLTSDAPEYKPWALVIQDSNGENKIKML

SEQ ID NO: 152 - protein, 619 aa, Homo sapiens
MPDPAAHLPFFYGSISRAEAEEHLKLAGMADGLFLLRQCLRSLGGYVLSLVHDVRFHHFPIERQLNGTYAIAGGKAHCGPAELCEFYSRDPDGLPCNLRKPCNRPSGLEPQPGVFDCLRDAMVRDYVRQTWKLEGEALEQAIISQAPQVEKLIATTAHERMPWYHSSLTREEAERKLYSGAQTDGKFLLRPRKEQGTYALSLIYGKTVYHYLISQDKAGKYCIPEGTKFDTLWQLVEYLKLKADGLIYCLKEACPNSSASNASGAAAPTLPAHPSTLTHPQRRIDTLNSDGYTPEPARITSPDKPRPMPMDTSVYESPYSDPEELKDKKLFLKRDNLLIADIELGCGNFGSVRQGVYRMRKKQIDVAIKVLKQGTEKADTEEMMREAQIMHQLDNPYIVRLIGVCQAEALMLVMEMAGGGPLHKFLVGKREEIPVSNVAELLHQVSMGMKYLEEKNFVHRDLAARNVLLVNRHYAKISDFGLSKALGADDSYYTARSAGKWPLKWYAPECINFRKFSSRSDVWSYGVTMWEALSYGQKPYKKMKGPEVMAFIEQGKRMECPPECPPELYALMSDCWIYKWEDRPDFLTVEQRMRACYYSLASKVEGPPGSTQKAEAACA

SEQ ID NO: 153 - DNA, 2468 bp, Homo sapiens
gcttgccggagctcagcagacaccaggccttccgggcaggcctggcccaccgtgggcctcagagctgctgctggggcattcagaaccggctctccattggcattgggaccagagaccccgcaagtggcctgtttgcctggacatccacctgtacgtccccaggtttcgggaggcccaggggcgatgccagaccccgcggcgcacctgcccttcttctacggcagcatctcgcgtgccgaggccgaggagcacctgaagctggcgggcatggcggacgggctcttcctgctgcgccagtgcctgcgctcgctgggcggctatgtgctgtcgctcgtgcacgatgtgcgcttccaccactttcccatcgagcgccagctcaacggcacctacgccattgccggcggcaaagcgcactgtggaccggcagagctctgcgagttctactcgcgcgaccccgacgggctgccctgcaacctgcgcaagccgtgcaaccggccgtcgggcctcgagccgcagccgggggtcttcgactgcctgcgagacgccatggtgcgtgactacgtgcgccagacgtggaagctggagggcgaggccctggagcaggccatcatcagccaggccccgcaggtggagaagctcattgctacgacggcccacgagcggatgccctggtaccacagcagcctgacgcgtgaggaggccgagcgcaaactttactctggggcgcagaccgacggcaagttcctgctgaggccgcggaaggagcagggcacatacgccctgtccctcatctatgggaagacggtgtaccactacctcatcagccaagacaaggcgggcaagtactgcattcccgagggcaccaagtttgacacgctctggcagctggtggagtatctgaagctgaaggcggacgggctcatctactgcctgaaggaggcctgccccaacagcagtgccagcaacgcctcaggggctgctgctcccacactcccagcccacccatccacgttgactcatcctcagagacgaatcgacaccctcaactcagatggatacacccctgagccagcacgcataacgtccccagacaaaccgcggccgatgcccatggacacgagcgtgtatgagagcccctacagcgacccagaggagctcaaggacaagaagctcttcctgaagcgcgataacctcctcatagctgacattgaacttggctgcggcaactttggctcagtgcgccagggcgtgtaccgcatgcgcaagaagcagatcgacgtggccatcaaggtgctgaagcagggcacggagaaggcagacacggaagagatgatgcgcgaggcgcagatcatgcaccagctggacaacccctacatcgtgcggctcattggcgtctgccaggccgaggccctcatgctggtcatggagatggctgggggcgggccgctgcacaagttcctggtcggcaagagggaggagatccctgtgagcaatgtggccgagctgctgcaccaggtgtccatggggatgaagtacctggaggagaagaactttgtgcaccgtgacctggcggcccgcaacgtcctgctggttaaccggcactacgccaagatcagcgactttggcctctccaaagcactgggtgccgacgacagctactacactgcccgctcagcagggaagtggccgctcaagtggtacgcacccgaatgcatcaacttccgcaagttctccagccgcagcgatgtctggagctatggggtcaccatgtgggaggccttgtcctacggccagaagccctacaagaagatgaaagggccggaggtcatggccttcatcgagcagggcaagcggatggaatgcccaccagagtgtccacccgaactgtacgcactcatgagtgactgctggatctacaagtgggaggatcgccccgacttcctgaccgtggagcagcgcatgcgagcctgttactacagcctggccagcaaggtggaagggcccccaggcagcacacagaaggctgaggctgcctgtgcctgagctcccgctgcccaggggagccctccacaccggctcttccccaccctcagccccaccccaggtcctgcagtctggctgagccctgcttggttgtctccacacacagctgggctgtggtagggggtgtctcaggccacaccggccttgcattgcctgcctggccccctgtcctctctggctggggagcagggaggtccgggagggtgcggctgtgcagcctgtcctgggctggtggctcccggagggccctgagctgagggcattgcttacacggatgccttcccctgggccctgacattggagcctgggcatcctcaggtggtcaggcgtagatcaccagaataaacccagcttccctcttgaaaaaaaaaaaaaaaaaaaaaaaaaaaaaaaaaaaaaaaaaaaaaaaaaaaaaaaaaaaaaaa

SEQ ID NO: 154 - protein, 493 aa, Artificial Sequence
  Description of Artificial Sequence: Synthetic polypeptide
MALPVTALLLPLALLLHAARPDIVLTQSPPSLAMSLGKRATISCRASESVTILGSHLIHWYQQKPGQPPTLLIQLASNVQTGVPARFSGSGSRTDFTLTIDPVEEDDVAVYYCLQSRTIPRTFGGGTKLEIKGSTSGSGKPGSGEGSTKGQIQLVQSGPELKKPGETVKISCKASGYTFTDYSINWVKRAPGKGLKWMGWINTETREPAYAYDFRGRFAFSLETSASTAYLQINNLKYEDTATYFCALDYSYAMDYWGQGTSVTVSSAAATTTPAPRPPTPAPTIASQPLSLRPEACRPAAGGAVHTRGLDFACDIYIWAPLAGTCGVLLLSLVITLYCKRGRKKLLYIFKQPFMRPVQTTQEEDGCSCRFPEEEEGGCELRVKFSRSADAPAYQQGQNQLYNELNLGRREEYDVLDKRRGRDPEMGGKPRRKNPQEGLYNELQKDKMAEAYSEIGMKGERRRGKGHDGLYQGLSTATKDTYDALHMQALPPR

SEQ ID NO: 155 - protein, 4 aa, Unknown
  Description of Unknown: "KDEL" family motif peptide
KDEL

SEQ ID NO: 156 - RNA, 118 nt, Artificial Sequence
  Description of Artificial Sequence: Synthetic polynucleotide
guucugucuuuuggucaggacaaccgucuagcuauaagugcugcagggugugagaaacuccuauugcuggacgaugucucuuacgaggcauuagcacagagucucucagcugguacac

SEQ ID NO: 157 - RNA, 119 nt, Artificial Sequence
  Description of Artificial Sequence: Synthetic polynucleotide
guucugucuuuuggucaggacaaccgucuagcuauaagugcugcagggugugaggaaacuccuauugcuggacgaugucucuuacgaggcauuagcacaccgauuuugauucucaaaca

SEQ ID NO: 158 - RNA, 117 nt, Artificial Sequence
  Description of Artificial Sequence: Synthetic polynucleotide
guucugucuuuuggucaggacaaccgucuagcuauaagugcugcagggugugagaaacuccuauugcuggacgaugucucuuacgaggcauuagcacucaaacaaaugugcacaaag

SEQ ID NO: 159 - RNA, 118 nt, Artificial Sequence
  Description of Artificial Sequence: Synthetic polynucleotide
guucugucuuuuggucaggacaaccgucuagcuauaagugcugcagggugugagaaacuccuauugcuggacgaugucucuuacgaggcauuagcacucaaacaaaugugucacaaag

SEQ ID NO: 160 - RNA, 117 nt, Artificial Sequence
  Description of Artificial Sequence: Synthetic polynucleotide
guucugucuuuuggucaggacaaccgucuagcuauaagugcugcagggugugagaaacuccuauugcuggacgaugucucuuacgaggcauuagcacuuugagaaucaaaaucggua

SEQ ID NO: 161 - RNA, 118 nt, Artificial Sequence
  Description of Artificial Sequence: Synthetic polynucleotide
guucugucuuuuggucaggacaaccgucuagcuauaagugcugcagggugugagaaacuccuauugcuggacgaugucucuuacgaggcauuagcacugauguguauaucacagacaa

SEQ ID NO: 162 - RNA, 116 nt, Artificial Sequence
  Description of Artificial Sequence: Synthetic polynucleotide
guucugucuuuuggucaggacaaccgucuagcuauaagugcugcagggugugagaaacuccuauugcuggacgaugucucuuacgaggcauuagcaguugcuccaggccacagcau

SEQ ID NO: 163 - RNA, 118 nt, Artificial Sequence
  Description of Artificial Sequence: Synthetic polynucleotide
guucugucuuuuggucaggacaaccgucuagcuauaagugcugcagggugugagaaacuccuauugcuggacgaugucucuuacgaggcauuagcacuuccagaagacaccuucuucc

SEQ ID NO: 164 - RNA, 118 nt, Artificial Sequence
  Description of Artificial Sequence: Synthetic polynucleotide
guucugucuuuuggucaggacaaccgucuagcuauaagugcugcagggugugagaaacuccuauugcuggacgaugucucuuacgaggcauuagcaccagaagacaccuucuucccca

SEQ ID NO: 165 - RNA, 117 nt, Artificial Sequence
  Description of Artificial Sequence: Synthetic polynucleotide
guucugucuuuuggucaggacaaccgucuagcuauaagugcugcagggugugagagaaacuccuauugcuggacgaugucucuuacgaggcauuagcacgguuccgaauccuccuga

SEQ ID NO: 166 - RNA, 118 nt, Artificial Sequence
  Description of Artificial Sequence: Synthetic polynucleotide
guucugucuuuuggucaggacaaccgucuagcuauaagugcugcagggugugagaaacuccuauugcuggacgaugucucuuacgaggcauuagcacggaacccaaucacugacaggu

SEQ ID NO: 167 - DNA, 117 bp, Artificial Sequence
  Description of Artificial Sequence: Synthetic polynucleotide
gttctgtcttttggtcaggacaaccgtctagctataagtgctgcagggtgtgagaaactcctattgctggacgatgtctcttacgaggcattagcacagagtctctcagctggtaca

SEQ ID NO: 168 - DNA, 117 bp, Artificial Sequence
  Description of Artificial Sequence: Synthetic polynucleotide
gttctgtcttttggtcaggacaaccgtctagctataagtgctgcagggtgtgagaaactcctattgctggacgatgtctcttacgaggcattagcacaccgattttgattctcaaac

SEQ ID NO: 169 - DNA, 117 bp, Artificial Sequence
  Description of Artificial Sequence: Synthetic polynucleotide
gttctgtcttttggtcaggacaaccgtctagctataagtgctgcagggtgtgagaaactcctattgctggacgatgtctcttacgaggcattagcactgattctcaaacaaatgtgt

SEQ ID NO: 170 - DNA, 117 bp, Artificial Sequence
  Description of Artificial Sequence: Synthetic polynucleotide
gttctgtcttttggtcaggacaaccgtctagctataagtgctgcagggtgtgagaaactcctattgctggacgatgtctcttacgaggcattagcactcaaacaaatgtgtcacaaa

SEQ ID NO: 171 - DNA, 117 bp, Artificial Sequence
  Description of Artificial Sequence: Synthetic polynucleotide
gttctgtcttttggtcaggacaaccgtctagctataagtgctgcagggtgtgagaaactcctattgctggacgatgtctcttacgaggcattagcacgtttgagaatcaaaatcggt

SEQ ID NO: 172 - DNA, 117 bp, Artificial Sequence
  Description of Artificial Sequence: Synthetic polynucleotide
gttctgtcttttggtcaggacaaccgtctagctataagtgctgcagggtgtgagaaactcctattgctggacgatgtctcttacgaggcattagcactgatgtgtatatcacagaca

SEQ ID NO: 173 - DNA, 117 bp, Artificial Sequence
  Description of Artificial Sequence: Synthetic polynucleotide
gttctgtcttttggtcaggacaaccgtctagctataagtgctgcagggtgtgagaaactcctattgctggacgatgtctcttacgaggcattagcacgttgctccaggccacagcac

SEQ ID NO: 174 - DNA, 117 bp, Artificial Sequence
  Description of Artificial Sequence: Synthetic polynucleotide
gttctgtcttttggtcaggacaaccgtctagctataagtgctgcagggtgtgagaaactcctattgctggacgatgtctcttacgaggcattagcacttccagaagacaccttcttc

SEQ ID NO: 175 - DNA, 117 bp, Artificial Sequence
  Description of Artificial Sequence: Synthetic polynucleotide
gttctgtcttttggtcaggacaaccgtctagctataagtgctgcagggtgtgagaaactcctattgctggacgatgtctcttacgaggcattagcaccagaagacaccttcttcccc

SEQ ID NO: 176 - DNA, 117 bp, Artificial Sequence
  Description of Artificial Sequence: Synthetic polynucleotide
gttctgtcttttggtcaggacaaccgtctagctataagtgctgcagggtgtgagaaactcctattgctggacgatgtctcttacgaggcattagcacggttccgaatcctcctcctg

SEQ ID NO: 177 - DNA, 117 bp, Artificial Sequence
  Description of Artificial Sequence: Synthetic polynucleotide
gttctgtcttttggtcaggacaaccgtctagctataagtgctgcagggtgtgagaaactcctattgctggacgatgtctcttacgaggcattagcacggaacccaatcactgacagg

SEQ ID NO: 178 - DNA, 108 bp, Artificial Sequence
  Description of Artificial Sequence: Synthetic polynucleotide
gacctatagggtcaatgaatctgtgcgtgtgccataagtaattaaaaattacccaccacaggagcacctgaaaacaggtgcttggcacagagtctctcagctggtaca

SEQ ID NO: 179 - DNA, 108 bp, Artificial Sequence
  Description of Artificial Sequence: Synthetic polynucleotide
gacctatagggtcaatgaatctgtgcgtgtgccataagtaattaaaaattacccaccacaggagcacctgaaaacaggtgcttggcacaccgattttgattctcaaac

SEQ ID NO: 180 - DNA, 108 bp, Artificial Sequence
  Description of Artificial Sequence: Synthetic polynucleotide
gacctatagggtcaatgaatctgtgcgtgtgccataagtaattaaaaattacccaccacaggagcacctgaaaacaggtgcttggcactgattctcaaacaaatgtgt

SEQ ID NO: 181 - DNA, 108 bp, Artificial Sequence
  Description of Artificial Sequence: Synthetic polynucleotide
gacctatagggtcaatgaatctgtgcgtgtgccataagtaattaaaaattacccaccacaggagcacctgaaaacaggtgcttggcactcaaacaaatgtgtcacaaa

SEQ ID NO: 182 - DNA, 108 bp, Artificial Sequence
  Description of Artificial Sequence: Synthetic polynucleotide
gacctatagggtcaatgaatctgtgcgtgtgccataagtaattaaaaattacccaccacaggagcacctgaaaacaggtgcttggcacgtttgagaatcaaaatcggt

SEQ ID NO: 183 - DNA, 108 bp, Artificial Sequence
  Description of Artificial Sequence: Synthetic polynucleotide
gacctatagggtcaatgaatctgtgcgtgtgccataagtaattaaaaattacccaccacaggagcacctgaaaacaggtgcttggcactgatgtgtatatcacagaca

SEQ ID NO: 184 - DNA, 108 bp, Artificial Sequence
  Description of Artificial Sequence: Synthetic polynucleotide
gacctatagggtcaatgaatctgtgcgtgtgccataagtaattaaaaattacccaccacaggagcacctgaaaacaggtgcttggcacgttgctccaggccacagcac

SEQ ID NO: 185 - DNA, 108 bp, Artificial Sequence
  Description of Artificial Sequence: Synthetic polynucleotide
gacctatagggtcaatgaatctgtgcgtgtgccataagtaattaaaaattacccaccacaggagcacctgaaaacaggtgcttggcacttccagaagacaccttcttc

SEQ ID NO: 186 - DNA, 108 bp, Artificial Sequence
  Description of Artificial Sequence: Synthetic polynucleotide
gacctatagggtcaatgaatctgtgcgtgtgccataagtaattaaaaattacccaccacaggagcacctgaaaacaggtgcttggcaccagaagacaccttcttcccc

SEQ ID NO: 187 - DNA, 108 bp, Artificial Sequence
  Description of Artificial Sequence: Synthetic polynucleotide
gacctatagggtcaatgaatctgtgcgtgtgccataagtaattaaaaattacccaccacaggagcacctgaaaacaggtgcttggcacggttccgaatcctcctcctg

SEQ ID NO: 188 - DNA, 108 bp, Artificial Sequence
  Description of Artificial Sequence: Synthetic polynucleotide
gacctatagggtcaatgaatctgtgcgtgtgccataagtaattaaaaattacccaccacaggagcacctgaaaacaggtgcttggcacggaacccaatcactgacagg

SEQ ID NO: 189 - RNA, 117 nt, Artificial Sequence
  Description of Artificial Sequence: Synthetic polynucleotide
guucugucuuuuggucaggacaaccgucuagcuauaagugcugcagggugugagaaacuccuauugcuggacgaugucucuuacgaggcauuagcacagagucucucagcugguaca

SEQ ID NO: 190 - RNA, 117 nt, Artificial Sequence
  Description of Artificial Sequence: Synthetic polynucleotide
guucugucuuuuggucaggacaaccgucuagcuauaagugcugcagggugugagaaacuccuauugcuggacgaugucucuuacgaggcauuagcacaccgauuuugauucucaaac

SEQ ID NO: 191 - RNA, 117 nt, Artificial Sequence
  Description of Artificial Sequence: Synthetic polynucleotide
guucugucuuuuggucaggacaaccgucuagcuauaagugcugcagggugugagaaacuccuauugcuggacgaugucucuuacgaggcauuagcacugauucucaaacaaaugugu

SEQ ID NO: 192 - RNA, 117 nt, Artificial Sequence
  Description of Artificial Sequence: Synthetic polynucleotide
guucugucuuuuggucaggacaaccgucuagcuauaagugcugcagggugugagaaacuccuauugcuggacgaugucucuuacgaggcauuagcacucaaacaaaugugucacaaa

SEQ ID NO: 193 - RNA, 117 nt, Artificial Sequence
  Description of Artificial Sequence: Synthetic polynucleotide
guucugucuuuuggucaggacaaccgucuagcuauaagugcugcagggugugagaaacuccuauugcuggacgaugucucuuacgaggcauuagcacguuugagaaucaaaaucggu

SEQ ID NO: 194 - RNA, 117 nt, Artificial Sequence
  Description of Artificial Sequence: Synthetic polynucleotide
guucugucuuuuggucaggacaaccgucuagcuauaagugcugcagggugugagaaacuccuauugcuggacgaugucucuuacgaggcauuagcacugauguguauaucacagaca

SEQ ID NO: 195 - RNA, 117 nt, Artificial Sequence
  Description of Artificial Sequence: Synthetic polynucleotide
guucugucuuuuggucaggacaaccgucuagcuauaagugcugcagggugugagaaacuccuauugcuggacgaugucucuuacgaggcauuagcacguugcuccaggccacagcac

SEQ ID NO: 196 - RNA, 117 nt, Artificial Sequence
  Description of Artificial Sequence: Synthetic polynucleotide
guucugucuuuuggucaggacaaccgucuagcuauaagugcugcagggugugagaaacuccuauugcuggacgaugucucuuacgaggcauuagcacuuccagaagacaccuucuuc

SEQ ID NO: 197 - RNA, 117 nt, Artificial Sequence
  Description of Artificial Sequence: Synthetic polynucleotide
guucugucuuuuggucaggacaaccgucuagcuauaagugcugcagggugugagaaacuccuauugcuggacgaugucucuuacgaggcauuagcaccagaagacaccuucuucccc

SEQ ID NO: 198 - RNA, 117 nt, Artificial Sequence
  Description of Artificial Sequence: Synthetic polynucleotide
guucugucuuuuggucaggacaaccgucuagcuauaagugcugcagggugugagaaacuccuauugcuggacgaugucucuuacgaggcauuagcacgguuccgaauccuccuccug

SEQ ID NO: 199 - RNA, 117 nt, Artificial Sequence
  Description of Artificial Sequence: Synthetic polynucleotide
guucugucuuuuggucaggacaaccgucuagcuauaagugcugcagggugugagaaacuccuauugcuggacgaugucucuuacgaggcauuagcacggaacccaaucacugacagg

SEQ ID NO: 200 - RNA, 108 nt, Artificial Sequence
  Description of Artificial Sequence: Synthetic polynucleotide
gaccuauagggucaaugaaucugugcgugugccauaaguaauuaaaaauuacccaccacaggagcaccugaaaacaggugcuuggcacagagucucucagcugguaca

SEQ ID NO: 201 - RNA, 108 nt, Artificial Sequence
  Description of Artificial Sequence: Synthetic polynucleotide
gaccuauagggucaaugaaucugugcgugugccauaaguaauuaaaaauuacccaccacaggagcaccugaaaacaggugcuuggcacaccgauuuugauucucaaac

SEQ ID NO: 202 - RNA, 108 nt, Artificial Sequence
  Description of Artificial Sequence: Synthetic polynucleotide
gaccuauagggucaaugaaucugugcgugugccauaaguaauuaaaaauuacccaccacaggagcaccugaaaacaggugcuuggcacugauucucaaacaaaugugu

SEQ ID NO: 203 - RNA, 108 nt, Artificial Sequence
  Description of Artificial Sequence: Synthetic polynucleotide
gaccuauagggucaaugaaucugugcgugugccauaaguaauuaaaaauuacccaccacaggagcaccugaaaacaggugcuuggcacucaaacaaaugugucacaaa

SEQ ID NO: 204 - RNA, 108 nt, Artificial Sequence
  Description of Artificial Sequence: Synthetic polynucleotide
gaccuauagggucaaugaaucugugcgugugccauaaguaauuaaaaauuacccaccacaggagcaccugaaaacaggugcuuggcacguuugagaaucaaaaucggu

SEQ ID NO: 205 - RNA, 108 nt, Artificial Sequence
  Description of Artificial Sequence: Synthetic polynucleotide
gaccuauagggucaaugaaucugugcgugugccauaaguaauuaaaaauuacccaccacaggagcaccugaaaacaggugcuuggcacugauguguauaucacagaca

SEQ ID NO: 206 - RNA, 108 nt, Artificial Sequence
  Description of Artificial Sequence: Synthetic polynucleotide
gaccuauagggucaaugaaucugugcgugugccauaaguaauuaaaaauuacccaccacaggagcaccugaaaacaggugcuuggcacguugcuccaggccacagcac

SEQ ID NO: 207 - RNA, 108 nt, Artificial Sequence
  Description of Artificial Sequence: Synthetic polynucleotide
gaccuauagggucaaugaaucugugcgugugccauaaguaauuaaaaauuacccaccacaggagcaccugaaaacaggugcuuggcacuuccagaagacaccuucuuc

SEQ ID NO: 208 - RNA, 108 nt, Artificial Sequence
  Description of Artificial Sequence: Synthetic polynucleotide
gaccuauagggucaaugaaucugugcgugugccauaaguaauuaaaaauuacccaccacaggagcaccugaaaacaggugcuuggcaccagaagacaccuucuucccc

SEQ ID NO: 209 - RNA, 108 nt, Artificial Sequence
  Description of Artificial Sequence: Synthetic polynucleotide
gaccuauagggucaaugaaucugugcgugugccauaaguaauuaaaaauuacccaccacaggagcaccugaaaacaggugcuuggcacgguuccgaauccuccuccug

SEQ ID NO: 210 - RNA, 108 nt, Artificial Sequence
  Description of Artificial Sequence: Synthetic polynucleotide
gaccuauagggucaaugaaucugugcgugugccauaaguaauuaaaaauuacccaccacaggagcaccugaaaacaggugcuuggcacggaacccaaucacugacagg

SEQ ID NO: 211 - DNA, 20 bp, Artificial Sequence
  Description of Artificial Sequence: Synthetic oligonucleotide
ctcgatgcgaggactctcca

SEQ ID NO: 212 - DNA, 20 bp, Artificial Sequence
  Description of Artificial Sequence: Synthetic oligonucleotide
tctcgatgcgaggactctcc

SEQ ID NO: 213 - DNA, 20 bp, Artificial Sequence
  Description of Artificial Sequence: Synthetic oligonucleotide
catcgagataacctcgtgct

SEQ ID NO: 214 - DNA, 20 bp, Artificial Sequence
  Description of Artificial Sequence: Synthetic oligonucleotide
tggccgggctcaggcacgag

SEQ ID NO: 215 - DNA, 20 bp, Artificial Sequence
  Description of Artificial Sequence: Synthetic oligonucleotide
gcccactggtaggggtgctg

SEQ ID NO: 216 - DNA, 20 bp, Artificial Sequence
  Description of Artificial Sequence: Synthetic oligonucleotide
tgggctcggtggtgggactt

SEQ ID NO: 217 - DNA, 20 bp, Artificial Sequence
  Description of Artificial Sequence: Synthetic oligonucleotide
cgagcccactacgagacgga

SEQ ID NO: 218 - DNA, 20 bp, Artificial Sequence
  Description of Artificial Sequence: Synthetic oligonucleotide
ctcgtagtgggctcggtggt

SEQ ID NO: 219 - DNA, 20 bp, Artificial Sequence
  Description of Artificial Sequence: Synthetic oligonucleotide
gccgtgaaggcgtcggccgg

SEQ ID NO: 220 - DNA, 20 bp, Artificial Sequence
  Description of Artificial Sequence: Synthetic oligonucleotide
gtttctgagtttcaggattc

SEQ ID NO: 221 - DNA, 20 bp, Artificial Sequence
  Description of Artificial Sequence: Synthetic oligonucleotide
catcgggaggaagaacacac

SEQ ID NO: 222 - DNA, 20 bp, Artificial Sequence
  Description of Artificial Sequence: Synthetic oligonucleotide
ggaggaagaacacacgggta

SEQ ID NO: 223 - DNA, 20 bp, Artificial Sequence
  Description of Artificial Sequence: Synthetic oligonucleotide
gagcgctgggctgcatcaga

SEQ ID NO: 224 - DNA, 20 bp, Artificial Sequence
  Description of Artificial Sequence: Synthetic oligonucleotide
tgatctcgatccgagggctc

SEQ ID NO: 225 - DNA, 20 bp, Artificial Sequence
  Description of Artificial Sequence: Synthetic oligonucleotide
acggagtgatctcgatccga

SEQ ID NO: 226 - DNA, 20 bp, Artificial Sequence
  Description of Artificial Sequence: Synthetic oligonucleotide
gcggaggcattcgtgcgccg

SEQ ID NO: 227 - DNA, 20 bp, Artificial Sequence
  Description of Artificial Sequence: Synthetic oligonucleotide
gccgcgctcagaaacttctg

SEQ ID NO: 228 - DNA, 20 bp, Artificial Sequence
  Description of Artificial Sequence: Synthetic oligonucleotide
gggcctcgggcctgagccct

SEQ ID NO: 229 - DNA, 20 bp, Artificial Sequence
  Description of Artificial Sequence: Synthetic oligonucleotide
cctcgggctggcggccaccc

SEQ ID NO: 230 - DNA, 20 bp, Artificial Sequence
  Description of Artificial Sequence: Synthetic oligonucleotide
ccactcgcccgtgccccgtc

SEQ ID NO: 231 - DNA, 20 bp, Artificial Sequence
  Description of Artificial Sequence: Synthetic oligonucleotide
gcattcgtgcgccgaggcct

SEQ ID NO: 232 - DNA, 20 bp, Artificial Sequence
  Description of Artificial Sequence: Synthetic oligonucleotide
gagcctcaccccagcgctcc

SEQ ID NO: 233 - DNA, 20 bp, Artificial Sequence
  Description of Artificial Sequence: Synthetic oligonucleotide
gaggggctccgggagcgctg

SEQ ID NO: 234 - DNA, 20 bp, Artificial Sequence
  Description of Artificial Sequence: Synthetic oligonucleotide
agggctggtcttccacatct

SEQ ID NO: 235 - DNA, 20 bp, Artificial Sequence
  Description of Artificial Sequence: Synthetic oligonucleotide
gcggggagcccaggccaaag

SEQ ID NO: 236 - DNA, 20 bp, Artificial Sequence
  Description of Artificial Sequence: Synthetic oligonucleotide
gccaccatgaagaccttttg

SEQ ID NO: 237 - DNA, 20 bp, Artificial Sequence
  Description of Artificial Sequence: Synthetic oligonucleotide
ttgcggcacacctgagtacc

SEQ ID NO: 238 - DNA, 20 bp, Artificial Sequence
  Description of Artificial Sequence: Synthetic oligonucleotide
gtaggagaactgggggaagt

SEQ ID NO: 239 - DNA, 20 bp, Artificial Sequence
  Description of Artificial Sequence: Synthetic oligonucleotide
ctcctactcggccagcggca

SEQ ID NO: 240 - DNA, 20 bp, Artificial Sequence
  Description of Artificial Sequence: Synthetic oligonucleotide
gaaaaccttctgtgggaccc

SEQ ID NO: 241 - DNA, 20 bp, Artificial Sequence
  Description of Artificial Sequence: Synthetic oligonucleotide
agtaggagaactgggggaag

SEQ ID NO: 242 - DNA, 20 bp, Artificial Sequence
  Description of Artificial Sequence: Synthetic oligonucleotide
gttgcaagtctgacatttga

SEQ ID NO: 243 - DNA, 20 bp, Artificial Sequence
  Description of Artificial Sequence: Synthetic oligonucleotide
gttgcaagtctgacatttga

SEQ ID NO: 244 - DNA, 20 bp, Artificial Sequence
  Description of Artificial Sequence: Synthetic oligonucleotide
gaaacactacctggtacaca

SEQ ID NO: 245 - DNA, 20 bp, Artificial Sequence
  Description of Artificial Sequence: Synthetic oligonucleotide
tgtggcagacctacagtgta

SEQ ID NO: 246 - DNA, 20 bp, Artificial Sequence
  Description of Artificial Sequence: Synthetic oligonucleotide
gggcacaccttgcattggta

SEQ ID NO: 247 - DNA, 20 bp, Artificial Sequence
  Description of Artificial Sequence: Synthetic oligonucleotide
ctgcgcacctggcattcatg

SEQ ID NO: 248 - DNA, 20 bp, Artificial Sequence
  Description of Artificial Sequence: Synthetic oligonucleotide
cctaccggtccgcaagcgtc

SEQ ID NO: 249 - DNA, 20 bp, Artificial Sequence
  Description of Artificial Sequence: Synthetic oligonucleotide
actcacacatctggataggt

SEQ ID NO: 250 - DNA, 20 bp, Artificial Sequence
  Description of Artificial Sequence: Synthetic oligonucleotide
gacttacctagaccttcctg

SEQ ID NO: 251 - DNA, 20 bp, Artificial Sequence
  Description of Artificial Sequence: Synthetic oligonucleotide
aatcttacagagctgaaaag

SEQ ID NO: 252 - DNA, 20 bp, Artificial Sequence
  Description of Artificial Sequence: Synthetic oligonucleotide
catcatattcttcacttcca

SEQ ID NO: 253 - DNA, 20 bp, Artificial Sequence
  Description of Artificial Sequence: Synthetic oligonucleotide
aagaatatgatgttcctccc

SEQ ID NO: 254 - DNA, 20 bp, Artificial Sequence
  Description of Artificial Sequence: Synthetic oligonucleotide
cccctaaaccacgaccgcgc

SEQ ID NO: 255 - DNA, 20 bp, Artificial Sequence
  Description of Artificial Sequence: Synthetic oligonucleotide
tcctgcgcggtcgtggttta

SEQ ID NO: 256 - DNA, 20 bp, Artificial Sequence
  Description of Artificial Sequence: Synthetic oligonucleotide
ccctactctgtgaccaactg

SEQ ID NO: 257 - DNA, 20 bp, Artificial Sequence
  Description of Artificial Sequence: Synthetic oligonucleotide
cgcaggcgcgtcttccaggt

SEQ ID NO: 258 - DNA, 20 bp, Artificial Sequence
  Description of Artificial Sequence: Synthetic oligonucleotide
gcaccgcaggcgcgtcttcc

SEQ ID NO: 259 - DNA, 20 bp, Artificial Sequence
  Description of Artificial Sequence: Synthetic oligonucleotide
gaacaagagcaatgactttg

SEQ ID NO: 260 - DNA, 20 bp, Artificial Sequence
  Description of Artificial Sequence: Synthetic oligonucleotide
cacctacctaagaaccatcc

SEQ ID NO: 261 - DNA, 20 bp, Artificial Sequence
  Description of Artificial Sequence: Synthetic oligonucleotide
ggggttccagggcctgtctg

SEQ ID NO: 262 - DNA, 20 bp, Artificial Sequence
  Description of Artificial Sequence: Synthetic oligonucleotide
gacttgcacaacatgcagaa

SEQ ID NO: 263 - DNA, 20 bp, Artificial Sequence
  Description of Artificial Sequence: Synthetic oligonucleotide
ttgccagaagcaagatccca

SEQ ID NO: 264 - DNA, 20 bp, Artificial Sequence
  Description of Artificial Sequence: Synthetic oligonucleotide
ccatgaacaaccaaaagaga

SEQ ID NO: 265 - DNA, 20 bp, Artificial Sequence
  Description of Artificial Sequence: Synthetic oligonucleotide
tcacccccatccagaagccg

SEQ ID NO: 266 - DNA, 20 bp, Artificial Sequence
  Description of Artificial Sequence: Synthetic oligonucleotide
atctggctggtctcgtccag

SEQ ID NO: 267 - DNA, 20 bp, Artificial Sequence
  Description of Artificial Sequence: Synthetic oligonucleotide
gatgagcgacctcccggtga

SEQ ID NO: 268 - DNA, 20 bp, Artificial Sequence
  Description of Artificial Sequence: Synthetic oligonucleotide
agacagcgatgacgtctctg

SEQ ID NO: 269 - DNA, 20 bp, Artificial Sequence
  Description of Artificial Sequence: Synthetic oligonucleotide
acgtctctgaggtggacgcg

SEQ ID NO: 270 - DNA, 20 bp, Artificial Sequence
  Description of Artificial Sequence: Synthetic oligonucleotide
ttaggggagagtttctcggc

SEQ ID NO: 271 - DNA, 20 bp, Artificial Sequence
  Description of Artificial Sequence: Synthetic oligonucleotide
ggagagtgaggaggaggaag

SEQ ID NO: 272 - DNA, 20 bp, Artificial Sequence
  Description of Artificial Sequence: Synthetic oligonucleotide
aaggctccgaatccgaatct

SEQ ID NO: 273 - DNA, 20 bp, Artificial Sequence
  Description of Artificial Sequence: Synthetic oligonucleotide
atcgtcactcacgaccggct

SEQ ID NO: 274 - DNA, 20 bp, Artificial Sequence
  Description of Artificial Sequence: Synthetic oligonucleotide
tgacagtgaggaggaacaag

SEQ ID NO: 275 - DNA, 20 bp, Artificial Sequence
  Description of Artificial Sequence: Synthetic oligonucleotide
cacccgtggttgttacactc

SEQ ID NO: 276 - DNA, 20 bp, Artificial Sequence
  Description of Artificial Sequence: Synthetic oligonucleotide
catcagccaggccccgcagg

SEQ ID NO: 277 - DNA, 20 bp, Artificial Sequence
  Description of Artificial Sequence: Synthetic oligonucleotide
ggtgtatccatctgagttga

SEQ ID NO: 278 - DNA, 20 bp, Artificial Sequence
  Description of Artificial Sequence: Synthetic oligonucleotide
gggtgtatccatctgagttg

SEQ ID NO: 279 - DNA, 20 bp, Artificial Sequence
  Description of Artificial Sequence: Synthetic oligonucleotide
gcgcaagaagcagatcgacg

SEQ ID NO: 280 - DNA, 20 bp, Artificial Sequence
  Description of Artificial Sequence: Synthetic oligonucleotide
ttactacagcctggccagca

SEQ ID NO: 281 - RNA, 20 nt, Artificial Sequence
  Description of Artificial Sequence: Synthetic oligonucleotide
cucgaugcgaggacucucca

SEQ ID NO: 282 - RNA, 20 nt, Artificial Sequence
  Description of Artificial Sequence: Synthetic oligonucleotide
ucucgaugcgaggacucucc

SEQ ID NO: 283 - RNA, 20 nt, Artificial Sequence
  Description of Artificial Sequence: Synthetic oligonucleotide
caucgagauaaccucgugcu

SEQ ID NO: 284 - RNA, 20 nt, Artificial Sequence
  Description of Artificial Sequence: Synthetic oligonucleotide
uggccgggcucaggcacgag

SEQ ID NO: 285 - RNA, 20 nt, Artificial Sequence
  Description of Artificial Sequence: Synthetic oligonucleotide
gcccacugguaggggugcug

SEQ ID NO: 286 - RNA, 20 nt, Artificial Sequence
  Description of Artificial Sequence: Synthetic oligonucleotide
ugggcucgguggugggacuu

SEQ ID NO: 287 - RNA, 20 nt, Artificial Sequence
  Description of Artificial Sequence: Synthetic oligonucleotide
cgagcccacuacgagacgga

SEQ ID NO: 288 - RNA, 20 nt, Artificial Sequence
  Description of Artificial Sequence: Synthetic oligonucleotide
cucguagugggcucgguggu

SEQ ID NO: 289 - RNA, 20 nt, Artificial Sequence
  Description of Artificial Sequence: Synthetic oligonucleotide
gccgugaaggcgucggccgg

SEQ ID NO: 290 - RNA, 20 nt, Artificial Sequence
  Description of Artificial Sequence: Synthetic oligonucleotide
guuucugaguuucaggauuc

SEQ ID NO: 291 - RNA, 20 nt, Artificial Sequence
  Description of Artificial Sequence: Synthetic oligonucleotide
caucgggaggaagaacacac

SEQ ID NO: 292 - RNA, 20 nt, Artificial Sequence
  Description of Artificial Sequence: Synthetic oligonucleotide
ggaggaagaacacacgggua

SEQ ID NO: 293 - RNA, 20 nt, Artificial Sequence
  Description of Artificial Sequence: Synthetic oligonucleotide
gagcgcugggcugcaucaga

SEQ ID NO: 294 - RNA, 20 nt, Artificial Sequence
  Description of Artificial Sequence: Synthetic oligonucleotide
ugaucucgauccgagggcuc

SEQ ID NO: 295 - RNA, 20 nt, Artificial Sequence
  Description of Artificial Sequence: Synthetic oligonucleotide
acggagugaucucgauccga

SEQ ID NO: 296 - RNA, 20 nt, Artificial Sequence
  Description of Artificial Sequence: Synthetic oligonucleotide
gcggaggcauucgugcgccg

SEQ ID NO: 297 - RNA, 20 nt, Artificial Sequence
  Description of Artificial Sequence: Synthetic oligonucleotide
gccgcgcucagaaacuucug

SEQ ID NO: 298 - RNA, 20 nt, Artificial Sequence
  Description of Artificial Sequence: Synthetic oligonucleotide
gggccucgggccugagcccu

SEQ ID NO: 299 - RNA, 20 nt, Artificial Sequence
  Description of Artificial Sequence: Synthetic oligonucleotide
ccucgggcuggcggccaccc

SEQ ID NO: 300 - RNA, 20 nt, Artificial Sequence
  Description of Artificial Sequence: Synthetic oligonucleotide
ccacucgcccgugccccguc

SEQ ID NO: 301 - RNA, 20 nt, Artificial Sequence
  Description of Artificial Sequence: Synthetic oligonucleotide
gcauucgugcgccgaggccu

SEQ ID NO: 302 - RNA, 20 nt, Artificial Sequence
  Description of Artificial Sequence: Synthetic oligonucleotide
gagccucaccccagcgcucc

SEQ ID NO: 303 - RNA, 20 nt, Artificial Sequence
  Description of Artificial Sequence: Synthetic oligonucleotide
gaggggcuccgggagcgcug

SEQ ID NO: 304 - RNA, 20 nt, Artificial Sequence
  Description of Artificial Sequence: Synthetic oligonucleotide
agggcuggucuuccacaucu

SEQ ID NO: 305 - DNA, 20 bp, Artificial Sequence
  Description of Artificial Sequence: Synthetic oligonucleotide
gcggggagcccaggccaaag

SEQ ID NO: 306 - RNA, 20 nt, Artificial Sequence
  Description of Artificial Sequence: Synthetic oligonucleotide
gccaccaugaagaccuuuug

SEQ ID NO: 307 - RNA, 20 nt, Artificial Sequence
  Description of Artificial Sequence: Synthetic oligonucleotide
uugcggcacaccugaguacc

SEQ ID NO: 308 - RNA, 20 nt, Artificial Sequence
  Description of Artificial Sequence: Synthetic oligonucleotide
guaggagaacugggggaagu

SEQ ID NO: 309 - RNA, 20 nt, Artificial Sequence
  Description of Artificial Sequence: Synthetic oligonucleotide
cuccuacucggccagcggca

SEQ ID NO: 310 - RNA, 20 nt, Artificial Sequence
  Description of Artificial Sequence: Synthetic oligonucleotide
gaaaaccuucugugggaccc

SEQ ID NO: 311 - RNA, 20 nt, Artificial Sequence
  Description of Artificial Sequence: Synthetic oligonucleotide
aguaggagaacugggggaag

SEQ ID NO: 312 - RNA, 20 nt, Artificial Sequence
  Description of Artificial Sequence: Synthetic oligonucleotide
guugcaagucugacauuuga

SEQ ID NO: 313 - RNA, 20 nt, Artificial Sequence
  Description of Artificial Sequence: Synthetic oligonucleotide
guugcaagucugacauuuga

SEQ ID NO: 314 - RNA, 20 nt, Artificial Sequence
  Description of Artificial Sequence: Synthetic oligonucleotide
gaaacacuaccugguacaca

SEQ ID NO: 315 - RNA, 20 nt, Artificial Sequence
  Description of Artificial Sequence: Synthetic oligonucleotide
uguggcagaccuacagugua

SEQ ID NO: 316 - RNA, 20 nt, Artificial Sequence
  Description of Artificial Sequence: Synthetic oligonucleotide
gggcacaccuugcauuggua

SEQ ID NO: 317 - RNA, 20 nt, Artificial Sequence
  Description of Artificial Sequence: Synthetic oligonucleotide
cugcgcaccuggcauucaug

SEQ ID NO: 318 - RNA, 20 nt, Artificial Sequence
  Description of Artificial Sequence: Synthetic oligonucleotide
ccuaccgguccgcaagcguc

SEQ ID NO: 319 - RNA, 20 nt, Artificial Sequence
  Description of Artificial Sequence: Synthetic oligonucleotide
acucacacaucuggauaggu

SEQ ID NO: 320 - RNA, 20 nt, Artificial Sequence
  Description of Artificial Sequence: Synthetic oligonucleotide
gacuuaccuagaccuuccug

SEQ ID NO: 321 - RNA, 20 nt, Artificial Sequence
  Description of Artificial Sequence: Synthetic oligonucleotide
aaucuuacagagcugaaaag

SEQ ID NO: 322 - RNA, 20 nt, Artificial Sequence
  Description of Artificial Sequence: Synthetic oligonucleotide
caucauauucuucacuucca

SEQ ID NO: 323 - RNA, 20 nt, Artificial Sequence
  Description of Artificial Sequence: Synthetic oligonucleotide
aagaauaugauguuccuccc

SEQ ID NO: 324 - RNA, 20 nt, Artificial Sequence
  Description of Artificial Sequence: Synthetic oligonucleotide
ccccuaaaccacgaccgcgc

SEQ ID NO: 325 - RNA, 20 nt, Artificial Sequence
  Description of Artificial Sequence: Synthetic oligonucleotide
uccugcgcggucgugguuua

SEQ ID NO: 326 - RNA, 20 nt, Artificial Sequence
  Description of Artificial Sequence: Synthetic oligonucleotide
cccuacucugugaccaacug

SEQ ID NO: 327 - RNA, 20 nt, Artificial Sequence
  Description of Artificial Sequence: Synthetic oligonucleotide
cgcaggcgcgucuuccaggu

SEQ ID NO: 328 - RNA, 20 nt, Artificial Sequence
  Description of Artificial Sequence: Synthetic oligonucleotide
gcaccgcaggcgcgucuucc

SEQ ID NO: 329 - RNA, 20 nt, Artificial Sequence
  Description of Artificial Sequence: Synthetic oligonucleotide
gaacaagagcaaugacuuug

SEQ ID NO: 330 - RNA, 20 nt, Artificial Sequence
  Description of Artificial Sequence: Synthetic oligonucleotide
caccuaccuaagaaccaucc

SEQ ID NO: 331 - RNA, 20 nt, Artificial Sequence
  Description of Artificial Sequence: Synthetic oligonucleotide
gggguuccagggccugucug

SEQ ID NO: 332 - RNA, 20 nt, Artificial Sequence
  Description of Artificial Sequence: Synthetic oligonucleotide
gacuugcacaacaugcagaa

SEQ ID NO: 333 - RNA, 20 nt, Artificial Sequence
  Description of Artificial Sequence: Synthetic oligonucleotide
uugccagaagcaagauccca

SEQ ID NO: 334 - RNA, 20 nt, Artificial Sequence
  Description of Artificial Sequence: Synthetic oligonucleotide
ccaugaacaaccaaaagaga

SEQ ID NO: 335 - RNA, 20 nt, Artificial Sequence
  Description of Artificial Sequence: Synthetic oligonucleotide
ucacccccauccagaagccg

SEQ ID NO: 336 - RNA, 20 nt, Artificial Sequence
  Description of Artificial Sequence: Synthetic oligonucleotide
aucuggcuggucucguccag

SEQ ID NO: 337 - RNA, 20 nt, Artificial Sequence
  Description of Artificial Sequence: Synthetic oligonucleotide
gaugagcgaccucccgguga

SEQ ID NO: 338 - RNA, 20 nt, Artificial Sequence
  Description of Artificial Sequence: Synthetic oligonucleotide
agacagcgaugacgucucug

SEQ ID NO: 339 - RNA, 20 nt, Artificial Sequence
  Description of Artificial Sequence: Synthetic oligonucleotide
acgucucugagguggacgcg

SEQ ID NO: 340 - RNA, 20 nt, Artificial Sequence
  Description of Artificial Sequence: Synthetic oligonucleotide
uuaggggagaguuucucggc

SEQ ID NO: 341 - RNA, 20 nt, Artificial Sequence
  Description of Artificial Sequence: Synthetic oligonucleotide
ggagagugaggaggaggaag

SEQ ID NO: 342 - RNA, 20 nt, Artificial Sequence
  Description of Artificial Sequence: Synthetic oligonucleotide
aaggcuccgaauccgaaucu

SEQ ID NO: 343 - RNA, 20 nt, Artificial Sequence
  Description of Artificial Sequence: Synthetic oligonucleotide
aucgucacucacgaccggcu

SEQ ID NO: 344 - RNA, 20 nt, Artificial Sequence
  Description of Artificial Sequence: Synthetic oligonucleotide
ugacagugaggaggaacaag

SEQ ID NO: 345 - RNA, 20 nt, Artificial Sequence
  Description of Artificial Sequence: Synthetic oligonucleotide
cacccgugguuguuacacuc

SEQ ID NO: 346 - RNA, 20 nt, Artificial Sequence
  Description of Artificial Sequence: Synthetic oligonucleotide
caucagccaggccccgcagg

SEQ ID NO: 347 - RNA, 20 nt, Artificial Sequence
  Description of Artificial Sequence: Synthetic oligonucleotide
gguguauccaucugaguuga

SEQ ID NO: 348 - RNA, 20 nt, Artificial Sequence
  Description of Artificial Sequence: Synthetic oligonucleotide
ggguguauccaucugaguug

SEQ ID NO: 349 - RNA, 20 nt, Artificial Sequence
  Description of Artificial Sequence: Synthetic oligonucleotide
gcgcaagaagcagaucgacg

SEQ ID NO: 350 - RNA, 20 nt, Artificial Sequence
  Description of Artificial Sequence: Synthetic oligonucleotide
uuacuacagccuggccagca

SEQ ID NO: 351 - protein, 166 aa, Escherichia coli
SEVEFSHEYWMRHALTLAKRAWDEREVPVGAVLVHNNRVIGEGWNRPIGRHDPTAHAEIMALRQGGLVMQNYRLIDATLYVTLEPCVMCAGAMIHSRIGRVVFGARDAKTGAAGSLMDVLHHPGMNHRVEITEGILADECAALLSDFFRMRRQEIKAQKKAQSSTD

SEQ ID NO: 352 - protein, 166 aa, Artificial Sequence
  Description of Artificial Sequence: Synthetic polypeptide
SEVEFSHEYWMRHALTLAKRARDEREVPVGAVLVLNNRVIGEGWNRAIGLHDPTAHAEIMALRQGGLVMQNYRLIDATLYVTFEPCVMCAGAMIHSRIGRVVFGVRNAKTGAAGSLMDVLHYPGMNHRVEITEGILADECAALLCYFFRMPRQVFNAQKKAQSSTD

SEQ ID NO: 353 - protein, 1368 aa, Artificial Sequence; identical to SEQ ID NO: 30
  Description of Artificial Sequence: Synthetic polypeptide

SEQ ID NO: 354 - protein, 1052 aa, Artificial Sequence
  Description of Artificial Sequence: Synthetic polypeptide
KRNYILGLDIGITSVGYGIIDYETRDVIDAGVRLFKEANVENNEGRRSKRGARRLKRRRRHRIQRVKKLLFDYNLLTDHSELSGINPYEARVKGLSQKLSEEEFSAALLHLAKRRGVHNVNEVEEDTGNELSTKEQISRNSKALEEKYVAELQLERLKKDGEVRGSINRFKTSDYVKEAKQLLKVQKAYHQLDQSFIDTYIDLLETRRTYYEGPGEGSPFGWKDIKEWYEMLMGHCTYFPEELRSVKYAYNADLYNALNDLNNLVITRDENEKLEYYEKFQIIENVFKQKKKPTLKQIAKEILVNEEDIKGYRVTSTGKPEFTNLKVYHDIKDITARKEIIENAELLDQIAKILTIYQSSEDIQEELTNLNSELTQEEIEQISNLKGYTGTHNLSLKAINLILDELWHTNDNQIAIFNRLKLVPKKVDLSQQKEIPTTLVDDFILSPVVKRSFIQSIKVINAIIKKYGLPNDIIIELAREKNSKDAQKMINEMQKRNRQTNERIEEIIRTTGKENAKYLIEKIKLHDMQEGKCLYSLEAIPLEDLLNNPFNYEVDHIIPRSVSFDNSFNNKVLVKQEENSKKGNRTPFQYLSSSDSKISYETFKKHILNLAKGKGRISKTKKEYLLEERDINRFSVQKDFINRNLVDTRYATRGLMNLLRSYFRVNNLDVKVKSINGGFTSFLRRKWKFKKERNKGYKHHAEDALIIANADFIFKEWKKLDKAKKVMENQMFEEKQAESMPEIETEQEYKEIFITPHQIKHIKDFKDYKYSHRVDKKPNRELINDTLYSTRKDDKGNTLIVNNLNGLYDKDNDKLKKLINKSPEKLLMYHHDPQTYQKLKLIMEQYGDEKNPLYKYYEETGNYLTKYSKKDNGPVIKKIKYYGNKLNAHLDITDDYPNSRNKVVKLSLKPYRFDVYLDNGVYKFVTVKNLDVIKKENYYEVNSKCYEEAKKLKKISNQAEFIASFYNNDLIKINGELYRVIGVNNDLLNRIEVNMIDITYREYLENMNDKRPPRIIKTIASKTQSIKKYSTDILGNLYEVKSKKHPQIIKKG

SEQ ID NO: 355 - protein, 1052 aa, Artificial Sequence
  Description of Artificial Sequence: Synthetic polypeptide
KRNYILGLDIGITSVGYGIIDYETRDVIDAGVRLFKEANVENNEGRRSKRGARRLKRRRRHRIQRVKKLLFDYNLLTDHSELSGINPYEARVKGLSQKLSEEEFSAALLHLAKRRGVHNVNEVEEDTGNELSTKEQISRNSKALEEKYVAELQLERLKKDGEVRGSINRFKTSDYVKEAKQLLKVQKAYHQLDQSFIDTYIDLLETRRTYYEGPGEGSPFGWKDIKEWYEMLMGHCTYFPEELRSVKYAYNADLYNALNDLNNLVITRDENEKLEYYEKFQIIENVFKQKKKPTLKQIAKEILVNEEDIKGYRVTSTGKPEFTNLKVYHDIKDITARKEIIENAELLDQIAKILTIYQSSEDIQEELTNLNSELTQEEIEQISNLKGYTGTHNLSLKAINLILDELWHTNDNQIAIFNRLKLVPKKVDLSQQKEIPTTLVDDFILSPVVKRSFIQSIKVINAIIKKYGLPNDIIIELAREKNSKDAQKMINEMQKRNRQTNERIEEIIRTTGKENAKYLIEKIKLHDMQEGKCLYSLEAIPLEDLLNNPFNYEVDHIIPRSVSFDNSFNNKVLVKQEEASKKGNRTPFQYLSSSDSKISYETFKKHILNLAKGKGRISKTKKEYLLEERDINRFSVQKDFINRNLVDTRYATRGLMNLLRSYFRVNNLDVKVKSINGGFTSFLRRKWKFKKERNKGYKHHAEDALIIANADFIFKEWKKLDKAKKVMENQMFEEKQAESMPEIETEQEYKEIFITPHQIKHIKDFKDYKYSHRVDKKPNRELINDTLYSTRKDDKGNTLIVNNLNGLYDKDNDKLKKLINKSPEKLLMYHHDPQTYQKLKLIMEQYGDEKNPLYKYYEETGNYLTKYSKKDNGPVIKKIKYYGNKLNAHLDITDDYPNSRNKVVKLSLKPYRFDVYLDNGVYKFVTVKNLDVIKKENYYEVNSKCYEEAKKLKKISNQAEFIASFYNNDLIKINGELYRVIGVNNDLLNRIEVNMIDITYREYLENMNDKRPPRIIKTIASKTQSIKKYSTDILGNLYEVKSKKHPQIIKKG

SEQ ID NO: 356 - protein, 1052 aa, Artificial Sequence
  Description of Artificial Sequence: Synthetic polypeptide
KRNYILGLDIGITSVGYGIIDYETRDVIDAGVRLFKEANVENNEGRRSKRGARRLKRRRRHRIQRVKKLLFDYNLLTDHSELSGINPYEARVKGLSQKLSEEEFSAALLHLAKRRGVHNVNEVEEDTGNELSTKEQISRNSKALEEKYVAELQLERLKKDGEVRGSINRFKTSDYVKEAKQLLKVQKAYHQLDQSFIDTYIDLLETRRTYYEGPGEGSPFGWKDIKEWYEMLMGHCTYFPEELRSVKYAYNADLYNALNDLNNLVITRDENEKLEYYEKFQIIENVFKQKKKPTLKQIAKEILVNEEDIKGYRVTSTGKPEFTNLKVYHDIKDITARKEIIENAELLDQIAKILTIYQSSEDIQEELTNLNSELTQEEIEQISNLKGYTGTHNLSLKAINLILDELWHTNDNQIAIFNRLKLVPKKVDLSQQKEIPTTLVDDFILSPVVKRSFIQSIKVINAIIKKYGLPNDIIIELAREKNSKDAQKMINEMQKRNRQTNERIEEIIRTTGKENAKYLIEKIKLHDMQEGKCLYSLEAIPLEDLLNNPFNYEVDHIIPRSVSFDNSFNNKVLVKQEEASKKGNRTPFQYLSSSDSKISYETFKKHILNLAKGKGRISKTKKEYLLEERDINRFSVQKDFINRNLVDTRYATRGLMNLLRSYFRVNNLDVKVKSINGGFTSFLRRKWKFKKERNKGYKHHAEDALIIANADFIFKEWKKLDKAKKVMENQMFEEKQAESMPEIETEQEYKEIFITPHQIKHIKDFKDYKYSHRVDKKPNRKLINDTLYSTRKDDKGNTLIVNNLNGLYDKDNDKLKKLINKSPEKLLMYHHDPQTYQKLKLIMEQYGDEKNPLYKYYEETGNYLTKYSKKDNGPVIKKIKYYGNKLNAHLDITDDYPNSRNKVVKLSLKPYRFDVYLDNGVYKFVTVKNLDVIKKENYYEVNSKCYEEAKKLKKISNQAEFIASFYKNDLIKINGELYRVIGVNNDLLNRIEVNMIDITYREYLENMNDKRPPHIIKTIASKTQSIKKYSTDILGNLYEVKSKKHPQIIKKG

SEQ ID NO: 357 - protein, 1367 aa, Artificial Sequence; identical to SEQ ID NO: 33
  Description of Artificial Sequence: Synthetic polypeptide

SEQ ID NO: 358 - protein, 1367 aa, Artificial Sequence; identical to SEQ ID NO: 32
  Description of Artificial Sequence: Synthetic polypeptide

SEQ ID NO: 359 - protein, 1366 aa, Artificial Sequence
  Description of Artificial Sequence: Synthetic polypeptide
DKKYSIGLAIGTNSVGWAVITDEYKVPSKKFKVLGNTDRHSIKKNLIGALLFDSGETAEATRLKRTARRRYTRRKNRICYLQEIFSNEMAKVDDSFFHRLEESFVEEDKKHERHPIFGNIVDEVAYHEKYPTIYHLRKKLVDSTDKADLRLIYLALAHMIKFRGHFLIEGDLNPDNSDVDKLFIQLVQTYNQLFEENPINASGVDAKAILSARLSKSRRLENLIAQLPGEKKNGLFGNLIALSLGLTPNFKSNFDLAEDAKLQLSKDTYDDDLDNLLAQIGDQYADLFLAAKNLSDAILLSDILRVNTEITKAPLSASMIKRYDEHHQDLTLLKALVRQQLPEKYKEIFFDQSKNGYAGYIDGGASQEEFYKFIKPILEKMDGTEELLVKLNREDLLRKQRTFDNGSIPHQIHLGELHAILRRQEDFYPFLKDNREKIEKILTFRIPYYVGPLARGNSRFAWMTRKSEETITPWNFEEVVDKGASAQSFIERMTNFDKNLPNEKVLPKHSLLYEYFTVYNELTKVKYVTEGMRKPAFLSGEQKKAIVDLLFKTNRKVTVKQLKEDYFKKIECFDSVEISGVEDRFNASLGTYHDLLKIIKDKDFLDNEENEDILEDIVLTLTLFEDREMIEERLKTYAHLFDDKVMKQLKRRRYTGWGRLSRKLINGIRDKQSGKTILDFLKSDGFANRNFMQLIHDDSLTFKEDIQKAQVSGQGDSLHEHIANLAGSPAIKKGILQTVKVVDELVKVMGRHKPENIVIEMARENQTTQKGQKNSRERMKRIEEGIKELGSQILKEHPVENTQLQNEKLYLYYLQNGRDMYVDQELDINRLSDYDVDHIVPQSFLKDDSIDNKVLTRSDKNRGKSDNVPSEEVVKKMKNYWRQLLNAKLITQRKFDNLTKAERGGLSELDKAGFIKRQLVETRQITKHVAQILDSRMNTKYDENDKLIREVKVITLKSKLVSDFRKDFQFYKVREINNYHHAHDAYLNAVVGTALIKKYPKLESEFVYGDYKVYDVRKMIAKSEQEIGKATAKYFFYSNIMNFFKTEITLANGEIRKRPLIETNGETGEIVWDKGRDFATVRKVLSMPQVNIVKKTEVQTGGFSKESILPKRNSDKLIARKKDWDPKKYGGFESPTVAYSVLVVAKVEKGKSKKLKSVKELLGITIMERSSFEKNPIDFLEAKGYKEVKKDLIIKLPKYSLFELENGRKRMLASAGELQKGNELALPSKYVNFLYLASHYEKLKGSPEDNEQKQLFVEQHKHYLDEIIEQISEFSKRVILADANLDKVLSAYNKHRDKPIREQAENIIHLFTLTNLGAPAAFKYFDTTIDRKQYRSTKEVLDATLIHQSITGLYETRIDLSQLGGD

SEQ ID NO: 360 - protein, 1367 aa, Artificial Sequence
  Description of Artificial Sequence: Synthetic polypeptide
DKKYSIGLAIGTNSVGWAVITDEYKVPSKKFKVLGNTDRHSIKKNLIGALLFDSGETAEATRLKRTARRRYTRRKNRICYLQEIFSNEMAKVDDSFFHRLEESFLVEEDKKHERHPIFGNIVDEVAYHEKYPTIYHLRKKLVDSTDKADLRLIYLALAHMIKFRGHFLIEGDLNPDNSDVDKLFIQLVQTYNQLFEENPINASGVDAKAILSARLSKSRRLENLIAQLPGEKKNGLFGNLIALSLGLTPNFKSNFDLAEDAKLQLSKDTYDDDLDNLLAQIGDQYADLFLAAKNLSDAILLSDILRVNTEITKAPLSASMIKRYDEHHQDLTLLKALVRQQLPEKYKEIFFDQSKNGYAGYIDGGASQEEFYKFIKPILEKMDGTEELLVKLNREDLLRKQRTFDNGSIPHQIHLGELHAILRRQEDFYPFLKDNREKIEKILTFRIPYYVGPLARGNSRFAWMTRKSEETITPWNFEEVVDKGASAQSFIERMTNFDKNLPNEKVLPKHSLLYEYFTVYNELTKVKYVTEGMRKPAFLSGEQKKAIVDLLFKTNRKVTVKQLKEDYFKKIECFDSVEISGVEDRFNASLGTYHDLLKIIKDKDFLDNEENEDILEDIVLTLTLFEDREMIEERLKTYAHLFDDKVMKQLKRRRYTGWGRLSRKLINGIRDKQSGKTILDFLKSDGFANRNFMQLIHDDSLTFKEDIQKAQVSGQGDSLHEHIANLAGSPAIKKGILQTVKVVDELVKVMGRHKPENIVIEMARENQTTQKGQKNSRERMKRIEEGIKELGSQILKEHPVENTQLQNEKLYLYYLQNGRDMYVDQELDINRLSDYDVDHIVPQSFLKDDSIDNKVLTRSDKNRGKSDNVPSEEVVKKMKNYWRQLLNAKLITQRKFDNLTKAERGGLSELDKAGFIKRQLVETRQITKHVAQILDSRMNTKYDENDKLIREVKVITLKSKLVSDFRKDFQFYKVREINNYHHAHDAYLNAVVGTALIKKYPKLESEFVYGDYKVYDVRKMIAKSEQEIGKATAKYFFYSNIMNFFKTEITLANGEIRKRPLIETNGETGEIVWDKGRDFATVRKVLSMPQVNIVKKTEVQTGGFSKESILPKRNSDKLIARKKDWDPKKYGGFVSPTVAYSVLVVAKVEKGKSKKLKSVKELLGITIMERSSFEKNPIDFLEAKGYKEVKKDLIIKLPKYSLFELENGRKRMLASAGELQKGNELALPSKYVNFLYLASHYEKLKGSPEDNEQKQLFVEQHKHYLDEIIEQISEFSKRVILADANLDKVLSAYNKHRDKPIREQAENIIHLFTLTNLGAPAAFKYFDTTIDRKQYRSTKEVLDATLIHQSITGLYETRIDLSQLGGD

SEQ ID NO: 361 - protein, 1367 aa, Artificial Sequence
  Description of Artificial Sequence: Synthetic polypeptide
DKKYSIGLAIGTNSVGWAVITDEYKVPSKKFKVLGNTDRHSIKKNLIGALLFDSGETAEATRLKRTARRRYTRRKNRICYLQEIFSNEMAKVDDSFFHRLEESFLVEEDKKHERHPIFGNIVDEVAYHEKYPTIYHLRKKLVDSTDKADLRLIYLALAHMIKFRGHFLIEGDLNPDNSDVDKLFIQLVQTYNQLFEENPINASGVDAKAILSARLSKSRRLENLIAQLPGEKKNGLFGNLIALSLGLTPNFKSNFDLAEDAKLQLSKDTYDDDLDNLLAQIGDQYADLFLAAKNLSDAILLSDILRVNTEITKAPLSASMIKRYDEHHQDLTLLKALVRQQLPEKYKEIFFDQSKNGYAGYIDGGASQEEFYKFIKPILEKMDGTEELLVKLNREDLLRKQRTFDNGSIPHQIHLGELHAILRRQEDFYPFLKDNREKIEKILTFRIPYYVGPLARGNSRFAWMTRKSEETITPWNFEEVVDKGASAQSFIERMTNFDKNLPNEKVLPKHSLLYEYFTVYNELTKVKYVTEGMRKPAFLSGEQKKAIVDLLFKTNRKVTVKQLKEDYFKKIECFDSVEISGVEDRFNASLGTYHDLLKIIKDKDFLDNEENEDILEDIVLTLTLFEDREMIEERLKTYAHLFDDKVMKQLKRRRYTGWGRLSRKLINGIRDKQSGKTILDFLKSDGFANRNFMQLIHDDSLTFKEDIQKAQVSGQGDSLHEHIANLAGSPAIKKGILQTVKVVDELVKVMGRHKPENIVIEMARENQTTQKGQKNSRERMKRIEEGIKELGSQILKEHPVENTQLQNEKLYLYYLQNGRDMYVDQELDINRLSDYDVDHIVPQSFLKDDSIDNKVLTRSDKNRGKSDNVPSEEVVKKMKNYWRQLLNAKLITQRKFDNLTKAERGGLSELDKAGFIKRQLVETRQITKHVAQILDSRMNTKYDENDKLIREVKVITLKSKLVSDFRKDFQFYKVREINNYHHAHDAYLNAVVGTALIKKYPKLESEFVYGDYKVYDVRKMIAKSEQEIGKATAKYFFYSNIMNFFKTEITLANGEIRKRPLIETNGETGEIVWDKGRDFATVRKVLSMPQVNIVKKTEVQTGGFSKESILPKRNSDKLIARKKDWDPKKYGGFVSPTVAYSVLVVAKVEKGKSKKLKSVKELLGITIMERSSFEKNPIDFLEAKGYKEVKKDLIIKLPKYSLFELENGRKRMLASARELQKGNELALPSKYVNFLYLASHYEKLKGSPEDNEQKQLFVEQHKHYLDEIIEQISEFSKRVILADANLDKVLSAYNKHRDKPIREQAENIIHLFTLTNLGAPAAFKYFDTTIDRKEYRSTKEVLDATLIHQSITGLYETRIDLSQLGGD

SEQ ID NO: 362 - protein, 1367 aa, Artificial Sequence
  Description of Artificial Sequence: Synthetic polypeptide
DKKYSIGLAIGTNSVGWAVITDEYKVPSKKFKVLGNTDRHSIKKNLIGALLFDSGETAEATRLKRTARRRYTRRKNRICYLQEIFSNEMAKVDDSFFHRLEESFLVEEDKKHERHPIFGNIVDEVAYHEKYPTIYHLRKKLVDSTDKADLRLIYLALAHMIKFRGHFLIEGDLNPDNSDVDKLFIQLVQTYNQLFEENPINASGVDAKAILSARLSKSRRLENLIAQLPGEKKNGLFGNLIALSLGLTPNFKSNFDLAEDAKLQLSKDTYDDDLDNLLAQIGDQYADLFLAAKNLSDAILLSDILRVNTEITKAPLSASMIKRYDEHHQDLTLLKALVRQQLPEKYKEIFFDQSKNGYAGYIDGGASQEEFYKFIKPILEKMDGTEELLVKLNREDLLRKQRTFDNGSIPHQIHLGELHAILRRQEDFYPFLKDNREKIEKILTFRIPYYVGPLARGNSRFAWMTRKSEETITPWNFEEVVDKGASAQSFIERMTAFDKNLPNEKVLPKHSLLYEYFTVYNELTKVKYVTEGMRKPAFLSGEQKKAIVDLLFKTNRKVTVKQLKEDYFKKIECFDSVEISGVEDRFNASLGTYHDLLKIIKDKDFLDNEENEDILEDIVLTLTLFEDREMIEERLKTYAHLFDDKVMKQLKRRRYTGWGALSRKLINGIRDKQSGKTILDFLKSDGFANRNFMALIHDDSLTFKEDIQKAQVSGQGDSLHEHIANLAGSPAIKKGILQTVKVVDELVKVMGRHKPENIVIEMARENQTTQKGQKNSRERMKRIEEGIKELGSQILKEHPVENTQLQNEKLYLYYLQNGRDMYVDQELDINRLSDYDVDHIVPQSFLKDDSIDNKVLTRSDKNRGKSDNVPSEEVVKKMKNYWRQLLNAKLITQRKFDNLTKAERGGLSELDKAGFIKRQLVETRAITKHVAQILDSRMNTKYDENDKLIREVKVITLKSKLVSDFRKDFQFYKVREINNYHHAHDAYLNAVVGTALIKKYPKLESEFVYGDYKVYDVRKMIAKSEQEIGKATAKYFFYSNIMNFFKTEITLANGEIRKRPLIETNGETGEIVWDKGRDFATVRKVLSMPQVNIVKKTEVQTGGFSKESILPKRNSDKLIARKKDWDPKKYGGFDSPTVAYSVLVVAKVEKGKSKKLKSVKELLGITIMERSSFEKNPIDFLEAKGYKEVKKDLIIKLPKYSLFELENGRKRMLASAGELQKGNELALPSKYVNFLYLASHYEKLKGSPEDNEQKQLFVEQHKHYLDEIIEQISEFSKRVILADANLDKVLSAYNKHRDKPIREQAENIIHLFTLTNLGAPAAFKYFDTTIDRKRYTSTKEVLDATLIHQSITGLYETRIDLSQLGGD

SEQ ID NO: 363 - protein, 1300 aa, Francisella novicida
MSIYQEFVNKYSLSKTLRFELIPQGKTLENIKARGLILDDEKRAKDYKKAKQIIDKYHQFFIEEILSSVCISEDLLQNYSDVYFKLKKSDDDNLQKDFKSAKDTIKKQISEYIKDSEKFKNLFNQNLIDAKKGQESDLILWLKQSKDNGIELFKANSDITDIDEALEIIKSFKGWTTYFKGFHENRKNVYSSNDIPTSIIYRIVDDNLPKFLENKAKYESLKDKAPEAINYEQIKKDLAEELTFDIDYKTSEVNQRVFSLDEVFEIANFNNYLNQSGITKFNTIIGGKFVNGENTKRKGINEYINLYSQQINDKTLKKYKMSVLFKQILSDTESKSFVIDKLEDDSDVVTTMQSFYEQIAAFKTVEEKSIKETLSLLFDDLKAQKLDLSKIYFKNDKSLTDLSQQVFDDYSVIGTAVLEYITQQIAPKNLDNPSKKEQELIAKKTEKAKYLSLETIKLALEEFNKHRDIDKQCRFEEILANFAAIPMIFDEIAQNKDNLAQISIKYQNQGKKDLLQASAEDDVKAIKDLLDQTNNLLHKLKIFHISQSEDKANILDKDEHFYLVFEECYFELANIVPLYNKIRNYITQKPYSDEKFKLNFENSTLANGWDKNKEPDNTAILFIKDDKYYLGVMNKKNNKIFDDKAIKENKGEGYKKIVYKLLPGANKMLPKVFFSAKSIKFYNPSEDILRIRNHSTHTKNGSPQKGYEKFEFNIEDCRKFIDFYKQSISKHPEWKDFGFRFSDTQRYNSIDEFYREVENQGYKLTFENISESYIDSVVNQGKLYLFQIYNKDFSAYSKGRPNLHTLYWKALFDERNLQDVVYKLNGEAELFYRKQSIPKKITHPAKEAIANKNKDNPKKESVFEYDLIKDKRFTEDKFFFHCPITINFKSSGANKFNDEINLLLKEKANDVHILSIDRGERHLAYYTLVDGKGNIIKQDTFNIIGNDRMKTNYHDKLAAIEKDRDSARKDWKKINNIKEMKEGYLSQVVHEIAKLVIEYNAIVVFEDLNFGFKRGRFKVEKQVYQKLEKMLIEKLNYLVFKDNEFDKTGGVLRAYQLTAPFETFKKMGKQTGIIYYVPAGFTSKICPVTGFVNQLYPKYESVSKSQEFFSKFDKICYNLDKGYFEFSFDYKNFGDKAAKGKWTIASFGSRLINFRNSDKNHNWDTREVYPTKELEKLLKDYSIEYGHGECIKAAICGESDKKFFAKLTSVLNTILQMRNSKTGTELDYLISPVADVNGNFFDSRQAPKNMPQDADANGAYHIGLKGLMLLGRIKNNQEGKKLNLVIKNEEYFEFVQNRNN

SEQ ID NO: 364 - protein, 1300 aa, Artificial Sequence
  Description of Artificial Sequence: Synthetic polypeptide
MSIYQEFVNKYSLSKTLRFELIPQGKTLENIKARGLILDDEKRAKDYKKAKQIIDKYHQFFIEEILSSVCISEDLLQNYSDVYFKLKKSDDDNLQKDFKSAKDTIKKQISEYIKDSEKFKNLFNQNLIDAKKGQESDLILWLKQSKDNGIELFKANSDITDIDEALEIIKSFKGWTTYFKGFHENRKNVYSSNDIPTSIIYRIVDDNLPKFLENKAKYESLKDKAPEAINYEQIKKDLAEELTFDIDYKTSEVNQRVFSLDEVFEIANFNNYLNQSGITKFNTIIGGKFVNGENTKRKGINEYINLYSQQINDKTLKKYKMSVLFKQILSDTESKSFVIDKLEDDSDVVTTMQSFYEQIAAFKTVEEKSIKETLSLLFDDLKAQKLDLSKIYFKNDKSLTDLSQQVFDDYSVIGTAVLEYITQQIAPKNLDNPSKKEQELIAKKTEKAKYLSLETIKLALEEFNKHRDIDKQCRFEEILANFAAIPMIFDEIAQNKDNLAQISIKYQNQGKKDLLQASAEDDVKAIKDLLDQTNNLLHKLKIFHISQSEDKANILDKDEHFYLVFEECYFELANIVPLYNKIRNYITQKPYSDEKFKLNFENSTLANGWDKNKEPDNTAILFIKDDKYYLGVMNKKNNKIFDDKAIKENKGEGYKKIVYKLLPGANKMLPKVFFSAKSIKFYNPSEDILRIRNHSTHTKNGSPQKGYEKFEFNIEDCRKFIDFYKQSISKHPEWKDFGFRFSDTQRYNSIDEFYREVENQGYKLTFENISESYIDSVVNQGKLYLFQIYNKDFSAYSKGRPNLHTLYWKALFDERNLQDVVYKLNGEAELFYRKQSIPKKITHPAKEAIANKNKDNPKKESVFEYDLIKDKRFTEDKFFFHCPITINFKSSGANKFNDEINLLLKEKANDVHILSIARGERHLAYYTLVDGKGNIIKQDTFNIIGNDRMKTNYHDKLAAIEKDRDSARKDWKKINNIKEMKEGYLSQVVHEIAKLVIEYNAIVVFEDLNFGFKRGRFKVEKQVYQKLEKMLIEKLNYLVFKDNEFDKTGGVLRAYQLTAPFETFKKMGKQTGIIYYVPAGFTSKICPVTGFVNQLYPKYESVSKSQEFFSKFDKICYNLDKGYFEFSFDYKNFGDKAAKGKWTIASFGSRLINFRNSDKNHNWDTREVYPTKELEKLLKDYSIEYGHGECIKAAICGESDKKFFAKLTSVLNTILQMRNSKTGTELDYLISPVADVNGNFFDSRQAPKNMPQDADANGAYHIGLKGLMLLGRIKNNQEGKKLNLVIKNEEYFEFVQNRNN

SEQ ID NO: 365 - protein, 1300 aa, Artificial Sequence
  Description of Artificial Sequence: Synthetic polypeptide
MSIYQEFVNKYSLSKTLRFELIPQGKTLENIKARGLILDDEKRAKDYKKAKQIIDKYHQFFIEEILSSVCISEDLLQNYSDVYFKLKKSDDDNLQKDFKSAKDTIKKQISEYIKDSEKFKNLFNQNLIDAKKGQESDLILWLKQSKDNGIELFKANSDITDIDEALEIIKSFKGWTTYFKGFHENRKNVYSSNDIPTSIIYRIVDDNLPKFLENKAKYESLKDKAPEAINYEQIKKDLAEELTFDIDYKTSEVNQRVFSLDEVFEIANFNNYLNQSGITKFNTIIGGKFVNGENTKRKGINEYINLYSQQINDKTLKKYKMSVLFKQILSDTESKSFVIDKLEDDSDVVTTMQSFYEQIAAFKTVEEKSIKETLSLLFDDLKAQKLDLSKIYFKNDKSLTDLSQQVFDDYSVIGTAVLEYITQQIAPKNLDNPSKKEQELIAKKTEKAKYLSLETIKLALEEFNKHRDIDKQCRFEEILANFAAIPMIFDEIAQNKDNLAQISIKYQNQGKKDLLQASAEDDVKAIKDLLDQTNNLLHKLKIFHISQSEDKANILDKDEHFYLVFEECYFELANIVPLYNKIRNYITQKPYSDEKFKLNFENSTLANGWDKNKEPDNTAILFIKDDKYYLGVMNKKNNKIFDDKAIKENKGEGYKKIVYKLLPGANKMLPKVFFSAKSIKFYNPSEDILRIRNHSTHTKNGSPQKGYEKFEFNIEDCRKFIDFYKQSISKHPEWKDFGFRFSDTQRYNSIDEFYREVENQGYKLTFENISESYIDSVVNQGKLYLFQIYNKDFSAYSKGRPNLHTLYWKALFDERNLQDVVYKLNGEAELFYRKQSIPKKITHPAKEAIANKNKDNPKKESVFEYDLIKDKRFTEDKFFFHCPITINFKSSGANKFNDEINLLLKEKANDVHILSIDRGERHLAYYTLVDGKGNIIKQDTFNIIGNDRMKTNYHDKLAAIEKDRDSARKDWKKINNIKEMKEGYLSQVVHEIAKLVIEYNAIVVFADLNFGFKRGRFKVEKQVYQKLEKMLIEKLNYLVFKDNEFDKTGGVLRAYQLTAPFETFKKMGKQTGIIYYVPAGFTSKICPVTGFVNQLYPKYESVSKSQEFFSKFDKICYNLDKGYFEFSFDYKNFGDKAAKGKWTIASFGSRLINFRNSDKNHNWDTREVYPTKELEKLLKDYSIEYGHGECIKAAICGESDKKFFAKLTSVLNTILQMRNSKTGTELDYLISPVADVNGNFFDSRQAPKNMPQDADANGAYHIGLKGLMLLGRIKNNQEGKKLNLVIKNEEYFEFVQNRNN

SEQ ID NO: 366 - protein, 1300 aa, Artificial Sequence
  Description of Artificial Sequence: Synthetic polypeptide
MSIYQEFVNKYSLSKTLRFELIPQGKTLENIKARGLILDDEKRAKDYKKAKQIIDKYHQFFIEEILSSVCISEDLLQNYSDVYFKLKKSDDDNLQKDFKSAKDTIKKQISEYIKDSEKFKNLFNQNLIDAKKGQESDLILWLKQSKDNGIELFKANSDITDIDEALEIIKSFKGWTTYFKGFHENRKNVYSSNDIPTSIIYRIVDDNLPKFLENKAKYESLKDKAPEAINYEQIKKDLAEELTFDIDYKTSEVNQRVFSLDEVFEIANFNNYLNQSGITKFNTIIGGKFVNGENTKRKGINEYINLYSQQINDKTLKKYKMSVLFKQILSDTESKSFVIDKLEDDSDVVTTMQSFYEQIAAFKTVEEKSIKETLSLLFDDLKAQKLDLSKIYFKNDKSLTDLSQQVFDDYSVIGTAVLEYITQQIAPKNLDNPSKKEQELIAKKTEKAKYLSLETIKLALEEFNKHRDIDKQCRFEEILANFAAIPMIFDEIAQNKDNLAQISIKYQNQGKKDLLQASAEDDVKAIKDLLDQTNNLLHKLKIFHISQSEDKANILDKDEHFYLVFEECYFELANIVPLYNKIRNYITQKPYSDEKFKLNFENSTLANGWDKNKEPDNTAILFIKDDKYYLGVMNKKNNKIFDDKAIKENKGEGYKKIVYKLLPGANKMLPKVFFSAKSIKFYNPSEDILRIRNHSTHTKNGSPQKGYEKFEFNIEDCRKFIDFYKQSISKHPEWKDFGFRFSDTQRYNSIDEFYREVENQGYKLTFENISESYIDSVVNQGKLYLFQIYNKDFSAYSKGRPNLHTLYWKALFDERNLQDVVYKLNGEAELFYRKQSIPKKITHPAKEAIANKNKDNPKKESVFEYDLIKDKRFTEDKFFFHCPITINFKSSGANKFNDEINLLLKEKANDVHILSIDRGERHLAYYTLVDGKGNIIKQDTFNIIGNDRMKTNYHDKLAAIEKDRDSARKDWKKINNIKEMKEGYLSQVVHEIAKLVIEYNAIVVFEDLNFGFKRGRFKVEKQVYQKLEKMLIEKLNYLVFKDNEFDKTGGVLRAYQLTAPFETFKKMGKQTGIIYYVPAGFTSKICPVTGFVNQLYPKYESVSKSQEFFSKFDKICYNLDKGYFEFSFDYKNFGDKAAKGKWTIASFGSRLINFRNSDKNHNWDTREVYPTKELEKLLKDYSIEYGHGECIKAAICGESDKKFFAKLTSVLNTILQMRNSKTGTELDYLISPVADVNGNFFDSRQAPKNMPQDAAANGAYHIGLKGLMLLGRIKNNQEGKKLNLVIKNEEYFEFVQNRNN

SEQ ID NO: 367 - protein, 1300 aa, Artificial Sequence
  Description of Artificial Sequence: Synthetic polypeptide
MSIYQEFVNKYSLSKTLRFELIPQGKTLENIKARGLILDDEKRAKDYKKAKQIIDKYHQFFIEEILSSVCISEDLLQNYSDVYFKLKKSDDDNLQKDFKSAKDTIKKQISEYIKDSEKFKNLFNQNLIDAKKGQESDLILWLKQSKDNGIELFKANSDITDIDEALEIIKSFKGWTTYFKGFHENRKNVYSSNDIPTSIIYRIVDDNLPKFLENKAKYESLKDKAPEAINYEQIKKDLAEELTFDIDYKTSEVNQRVFSLDEVFEIANFNNYLNQSGITKFNTIIGGKFVNGENTKRKGINEYINLYSQQINDKTLKKYKMSVLFKQILSDTESKSFVIDKLEDDSDVVTTMQSFYEQIAAFKTVEEKSIKETLSLLFDDLKAQKLDLSKIYFKNDKSLTDLSQQVFDDYSVIGTAVLEYITQQIAPKNLDNPSKKEQELIAKKTEKAKYLSLETIKLALEEFNKHRDIDKQCRFEEILANFAAIPMIFDEIAQNKDNLAQISIKYQNQGKKDLLQASAEDDVKAIKDLLDQTNNLLHKLKIFHISQSEDKANILDKDEHFYLVFEECYFELANIVPLYNKIRNYITQKPYSDEKFKLNFENSTLANGWDKNKEPDNTAILFIKDDKYYLGVMNKKNNKIFDDKAIKENKGEGYKKIVYKLLPGANKMLPKVFFSAKSIKFYNPSEDILRIRNHSTHTKNGSPQKGYEKFEFNIEDCRKFIDFYKQSISKHPEWKDFGFRFSDTQRYNSIDEFYREVENQGYKLTFENISESYIDSVVNQGKLYLFQIYNKDFSAYSKGRPNLHTLYWKALFDERNLQDVVYKLNGEAELFYRKQSIPKKITHPAKEAIANKNKDNPKKESVFEYDLIKDKRFTEDKFFFHCPITINFKSSGANKFNDEINLLLKEKANDVHILSIARGERHLAYYTLVDGKGNIIKQDTFNIIGNDRMKTNYHDKLAAIEKDRDSARKDWKKINNIKEMKEGYLSQVVHEIAKLVIEYNAIVVFADLNFGFKRGRFKVEKQVYQKLEKMLIEKLNYLVFKDNEFDKTGGVLRAYQLTAPFETFKKMGKQTGIIYYVPAGFTSKICPVTGFVNQLYPKYESVSKSQEFFSKFDKICYNLDKGYFEFSFDYKNFGDKAAKGKWTIASFGSRLINFRNSDKNHNWDTREVYPTKELEKLLKDYSIEYGHGECIKAAICGESDKKFFAKLTSVLNTILQMRNSKTGTELDYLISPVADVNGNFFDSRQAPKNMPQDADANGAYHIGLKGLMLLGRIKNNQEGKKLNLVIKNEEYFEFVQNRNN

SEQ ID NO: 368 - protein, 1300 aa, Artificial Sequence
  Description of Artificial Sequence: Synthetic polypeptide
MSIYQEFVNKYSLSKTLRFELIPQGKTLENIKARGLILDDEKRAKDYKKAKQIIDKYHQFFIEEILSSVCISEDLLQNYSDVYFKLKKSDDDNLQKDFKSAKDTIKKQISEYIKDSEKFKNLFNQNLIDAKKGQESDLILWLKQSKDNGIELFKANSDITDIDEALEIIKSFKGWTTYFKGFHENRKNVYSSNDIPTSIIYRIVDDNLPKFLENKAKYESLKDKAPEAINYEQIKKDLAEELTFDIDYKTSEVNQRVFSLDEVFEIANFNNYLNQSGITKFNTIIGGKFVNGENTKRKGINEYINLYSQQINDKTLKKYKMSVLFKQILSDTESKSFVIDKLEDDSDVVTTMQSFYEQIAAFKTVEEKSIKETLSLLFDDLKAQKLDLSKIYFKNDKSLTDLSQQVFDDYSVIGTAVLEYITQQIAPKNLDNPSKKEQELIAKKTEKAKYLSLETIKLALEEFNKHRDIDKQCRFEEILANFAAIPMIFDEIAQNKDNLAQISIKYQNQGKKDLLQASAEDDVKAIKDLLDQTNNLLHKLKIFHISQSEDKANILDKDEHFYLVFEECYFELANIVPLYNKIRNYITQKPYSDEKFKLNFENSTLANGWDKNKEPDNTAILFIKDDKYYLGVMNKKNNKIFDDKAIKENKGEGYKKIVYKLLPGANKMLPKVFFSAKSIKFYNPSEDILRIRNHSTHTKNGSPQKGYEKFEFNIEDCRKFIDFYKQSISKHPEWKDFGFRFSDTQRYNSIDEFYREVENQGYKLTFENISESYIDSVVNQGKLYLFQIYNKDFSAYSKGRPNLHTLYWKALFDERNLQDVVYKLNGEAELFYRKQSIPKKITHPAKEAIANKNKDNPKKESVFEYDLIKDKRFTEDKFFFHCPITINFKSSGANKFNDEINLLLKEKANDVHILSIARGERHLAYYTLVDGKGNIIKQDTFNIIGNDRMKTNYHDKLAAIEKDRDSARKDWKKINNIKEMKEGYLSQVVHEIAKLVIEYNAIVVFEDLNFGFKRGRFKVEKQVYQKLEKMLIEKLNYLVFKDNEFDKTGGVLRAYQLTAPFETFKKMGKQTGIIYYVPAGFTSKICPVTGFVNQLYPKYESVSKSQEFFSKFDKICYNLDKGYFEFSFDYKNFGDKAAKGKWTIASFGSRLINFRNSDKNHNWDTREVYPTKELEKLLKDYSIEYGHGECIKAAICGESDKKFFAKLTSVLNTILQMRNSKTGTELDYLISPVADVNGNFFDSRQAPKNMPQDAAANGAYHIGLKGLMLLGRIKNNQEGKKLNLVIKNEEYFEFVQNRNN

SEQ ID NO: 369 - protein, 1300 aa, Artificial Sequence
  Description of Artificial Sequence: Synthetic polypeptide
MSIYQEFVNKYSLSKTLRFELIPQGKTLENIKARGLILDDEKRAKDYKKAKQIIDKYHQFFIEEILSSVCISEDLLQNYSDVYFKLKKSDDDNLQKDFKSAKDTIKKQISEYIKDSEKFKNLFNQNLIDAKKGQESDLILWLKQSKDNGIELFKANSDITDIDEALEIIKSFKGWTTYFKGFHENRKNVYSSNDIPTSIIYRIVDDNLPKFLENKAKYESLKDKAPEAINYEQIKKDLAEELTFDIDYKTSEVNQRVFSLDEVFEIANFNNYLNQSGITKFNTIIGGKFVNGENTKRKGINEYINLYSQQINDKTLKKYKMSVLFKQILSDTESKSFVIDKLEDDSDVVTTMQSFYEQIAAFKTVEEKSIKETLSLLFDDLKAQKLDLSKIYFKNDKSLTDLSQQVFDDYSVIGTAVLEYITQQIAPKNLDNPSKKEQELIAKKTEKAKYLSLETIKLALEEFNKHRDIDKQCRFEEILANFAAIPMIFDEIAQNKDNLAQISIKYQNQGKKDLLQASAEDDVKAIKDLLDQTNNLLHKLKIFHISQSEDKANILDKDEHFYLVFEECYFELANIVPLYNKIRNYITQKPYSDEKFKLNFENSTLANGWDKNKEPDNTAILFIKDDKYYLGVMNKKNNKIFDDKAIKENKGEGYKKIVYKLLPGANKMLPKVFFSAKSIKFYNPSEDILRIRNHSTHTKNGSPQKGYEKFEFNIEDCRKFIDFYKQSISKHPEWKDFGFRFSDTQRYNSIDEFYREVENQGYKLTFENISESYIDSVVNQGKLYLFQIYNKDFSAYSKGRPNLHTLYWKALFDERNLQDVVYKLNGEAELFYRKQSIPKKITHPAKEAIANKNKDNPKKESVFEYDLIKDKRFTEDKFFFHCPITINFKSSGANKFNDEINLLLKEKANDVHILSIDRGERHLAYYTLVDGKGNIIKQDTFNIIGNDRMKTNYHDKLAAIEKDRDSARKDWKKINNIKEMKEGYLSQVVHEIAKLVIEYNAIVVFADLNFGFKRGRFKVEKQVYQKLEKMLIEKLNYLVFKDNEFDKTGGVLRAYQLTAPFETFKKMGKQTGIIYYVPAGFTSKICPVTGFVNQLYPKYESVSKSQEFFSKFDKICYNLDKGYFEFSFDYKNFGDKAAKGKWTIASFGSRLINFRNSDKNHNWDTREVYPTKELEKLLKDYSIEYGHGECIKAAICGESDKKFFAKLTSVLNTILQMRNSKTGTELDYLISPVADVNGNFFDSRQAPKNMPQDAAANGAYHIGLKGLMLLGRIKNNQEGKKLNLVIKNEEYFEFVQNRNN

SEQ ID NO: 370 - protein, 1300 aa, Artificial Sequence
  Description of Artificial Sequence: Synthetic polypeptide
MSIYQEFVNKYSLSKTLRFELIPQGKTLENIKARGLILDDEKRAKDYKKAKQIIDKYHQFFIEEILSSVCISEDLLQNYSDVYFKLKKSDDDNLQKDFKSAKDTIKKQISEYIKDSEKFKNLFNQNLIDAKKGQESDLILWLKQSKDNGIELFKANSDITDIDEALEIIKSFKGWTTYFKGFHENRKNVYSSNDIPTSIIYRIVDDNLPKFLENKAKYESLKDKAPEAINYEQIKKDLAEELTFDIDYKTSEVNQRVFSLDEVFEIANFNNYLNQSGITKFNTIIGGKFVNGENTKRKGINEYINLYSQQINDKTLKKYKMSVLFKQILSDTESKSFVIDKLEDDSDVVTTMQSFYEQIAAFKTVEEKSIKETLSLLFDDLKAQKLDLSKIYFKNDKSLTDLSQQVFDDYSVIGTAVLEYITQQIAPKNLDNPSKKEQELIAKKTEKAKYLSLETIKLALEEFNKHRDIDKQCRFEEILANFAAIPMIFDEIAQNKDNLAQISIKYQNQGKKDLLQASAEDDVKAIKDLLDQTNNLLHKLKIFHISQSEDKANILDKDEHFYLVFEECYFELANIVPLYNKIRNYITQKPYSDEKFKLNFENSTLANGWDKNKEPDNTAILFIKDDKYYLGVMNKKNNKIFDDKAIKENKGEGYKKIVYKLLPGANKMLPKVFFSAKSIKFYNPSEDILRIRNHSTHTKNGSPQKGYEKFEFNIEDCRKFIDFYKQSISKHPEWKDFGFRFSDTQRYNSIDEFYREVENQGYKLTFENISESYIDSVVNQGKLYLFQIYNKDFSAYSKGRPNLHTLYWKALFDERNLQDVVYKLNGEAELFYRKQSIPKKITHPAKEAIANKNKDNPKKESVFEYDLIKDKRFTEDKFFFHCPITINFKSSGANKFNDEINLLLKEKANDVHILSIARGERHLAYYTLVDGKGNIIKQDTFNIIGNDRMKTNYHDKLAAIEKDRDSARKDWKKINNIKEMKEGYLSQVVHEIAKLVIEYNAIVVFADLNFGFKRGRFKVEKQVYQKLEKMLIEKLNYLVFKDNEFDKTGGVLRAYQLTAPFETFKKMGKQTGIIYYVPAGFTSKICPVTGFVNQLYPKYESVSKSQEFFSKFDKICYNLDKGYFEFSFDYKNFGDKAAKGKWTIASFGSRLINFRNSDKNHNWDTREVYPTKELEKLLKDYSIEYGHGECIKAAICGESDKKFFAKLTSVLNTILQMRNSKTGTELDYLISPVADVNGNFFDSRQAPKNMPQDAAANGAYHIGLKGLMLLGRIKNNQEGKKLNLVIKNEEYFEFVQNRNN

SEQ ID NO: 371 - protein, 1368 aa, Artificial Sequence [sequence omitted]

SEQ ID NO: 372 - protein, 1368 aa, Artificial Sequence; identical to SEQ ID NO: 27
  Description of Artificial Sequence: Synthetic polypeptide

SEQ ID NO: 373 - protein, 1367 aa, Artificial Sequence
  Description of Artificial Sequence: Synthetic polypeptide
MDKKYSIGLAIGTNSVGWAVITDEYKVPSKKFKVLGNTDRHSIKKNLIGALLFDSGETAEATRLKRTARRRYTRRKNRICYLQEIFSNEMAKVDDSFFHRLEESFVEEDKKHERHPIFGNIVDEVAYHEKYPTIYHLRKKLVDSTDKADLRLIYLALAHMIKFRGHFLIEGDLNPDNSDVDKLFIQLVQTYNQLFEENPINASGVDAKAILSARLSKSRRLENLIAQLPGEKKNGLFGNLIALSLGLTPNFKSNFDLAEDAKLQLSKDTYDDDLDNLLAQIGDQYADLFLAAKNLSDAILLSDILRVNTEITKAPLSASMIKRYDEHHQDLTLLKALVRQQLPEKYKEIFFDQSKNGYAGYIDGGASQEEFYKFIKPILEKMDGTEELLVKLNREDLLRKQRTFDNGSIPHQIHLGELHAILRRQEDFYPFLKDNREKIEKILTFRIPYYVGPLARGNSRFAWMTRKSEETITPWNFEEVVDKGASAQSFIERMTNFDKNLPNEKVLPKHSLLYEYFTVYNELTKVKYVTEGMRKPAFLSGEQKKAIVDLLFKTNRKVTVKQLKEDYFKKIECFDSVEISGVEDRFNASLGTYHDLLKIIKDKDFLDNEENEDILEDIVLTLTLFEDREMIEERLKTYAHLFDDKVMKQLKRRRYTGWGRLSRKLINGIRDKQSGKTILDFLKSDGFANRNFMQLIHDDSLTFKEDIQKAQVSGQGDSLHEHIANLAGSPAIKKGILQTVKVVDELVKVMGRHKPENIVIEMARENQTTQKGQKNSRERMKRIEEGIKELGSQILKEHPVENTQLQNEKLYLYYLQNGRDMYVDQELDINRLSDYDVDHIVPQSFLKDDSIDNKVLTRSDKNRGKSDNVPSEEVVKKMKNYWRQLLNAKLITQRKFDNLTKAERGGLSELDKAGFIKRQLVETRQITKHVAQILDSRMNTKYDENDKLIREVKVITLKSKLVSDFRKDFQFYKVREINNYHHAHDAYLNAVVGTALIKKYPKLESEFVYGDYKVYDVRKMIAKSEQEIGKATAKYFFYSNIMNFFKTEITLANGEIRKRPLIETNGETGEIVWDKGRDFATVRKVLSMPQVNIVKKTEVQTGGFSKESILPKRNSDKLIARKKDWDPKKYGGFESPTVAYSVLVVAKVEKGKSKKLKSVKELLGITIMERSSFEKNPIDFLEAKGYKEVKKDLIIKLPKYSLFELENGRKRMLASAGELQKGNELALPSKYVNFLYLASHYEKLKGSPEDNEQKQLFVEQHKHYLDEIIEQISEFSKRVILADANLDKVLSAYNKHRDKPIREQAENIIHLFTLTNLGAPAAFKYFDTTIDRKQYRSTKEVLDATLIHQSITGLYETRIDLSQLGGD

SEQ ID NO: 374 - protein, 1368 aa, Artificial Sequence
  Description of Artificial Sequence: Synthetic polypeptide
MDKKYSIGLAIGTNSVGWAVITDEYKVPSKKFKVLGNTDRHSIKKNLIGALLFDSGETAEATRLKRTARRRYTRRKNRICYLQEIFSNEMAKVDDSFFHRLEESFLVEEDKKHERHPIFGNIVDEVAYHEKYPTIYHLRKKLVDSTDKADLRLIYLALAHMIKFRGHFLIEGDLNPDNSDVDKLFIQLVQTYNQLFEENPINASGVDAKAILSARLSKSRRLENLIAQLPGEKKNGLFGNLIALSLGLTPNFKSNFDLAEDAKLQLSKDTYDDDLDNLLAQIGDQYADLFLAAKNLSDAILLSDILRVNTEITKAPLSASMIKRYDEHHQDLTLLKALVRQQLPEKYKEIFFDQSKNGYAGYIDGGASQEEFYKFIKPILEKMDGTEELLVKLNREDLLRKQRTFDNGSIPHQIHLGELHAILRRQEDFYPFLKDNREKIEKILTFRIPYYVGPLARGNSRFAWMTRKSEETITPWNFEEVVDKGASAQSFIERMTNFDKNLPNEKVLPKHSLLYEYFTVYNELTKVKYVTEGMRKPAFLSGEQKKAIVDLLFKTNRKVTVKQLKEDYFKKIECFDSVEISGVEDRFNASLGTYHDLLKIIKDKDFLDNEENEDILEDIVLTLTLFEDREMIEERLKTYAHLFDDKVMKQLKRRRYTGWGRLSRKLINGIRDKQSGKTILDFLKSDGFANRNFMQLIHDDSLTFKEDIQKAQVSGQGDSLHEHIANLAGSPAIKKGILQTVKVVDELVKVMGRHKPENIVIEMARENQTTQKGQKNSRERMKRIEEGIKELGSQILKEHPVENTQLQNEKLYLYYLQNGRDMYVDQELDINRLSDYDVDHIVPQSFLKDDSIDNKVLTRSDKNRGKSDNVPSEEVVKKMKNYWRQLLNAKLITQRKFDNLTKAERGGLSELDKAGFIKRQLVETRQITKHVAQILDSRMNTKYDENDKLIREVKVITLKSKLVSDFRKDFQFYKVREINNYHHAHDAYLNAVVGTALIKKYPKLESEFVYGDYKVYDVRKMIAKSEQEIGKATAKYFFYSNIMNFFKTEITLANGEIRKRPLIETNGETGEIVWDKGRDFATVRKVLSMPQVNIVKKTEVQTGGFSKESILPKRNSDKLIARKKDWDPKKYGGFVSPTVAYSVLVVAKVEKGKSKKLKSVKELLGITIMERSSFEKNPIDFLEAKGYKEVKKDLIIKLPKYSLFELENGRKRMLASAGELQKGNELALPSKYVNFLYLASHYEKLKGSPEDNEQKQLFVEQHKHYLDEIIEQISEFSKRVILADANLDKVLSAYNKHRDKPIREQAENIIHLFTLTNLGAPAAFKYFDTTIDRKQYRSTKEVLDATLIHQSITGLYETRIDLSQLGGD

SEQ ID NO: 375 - protein, 1368 aa, Artificial Sequence
  Description of Artificial Sequence: Synthetic polypeptide
MDKKYSIGLAIGTNSVGWAVITDEYKVPSKKFKVLGNTDRHSIKKNLIGALLFDSGETAEATRLKRTARRRYTRRKNRICYLQEIFSNEMAKVDDSFFHRLEESFLVEEDKKHERHPIFGNIVDEVAYHEKYPTIYHLRKKLVDSTDKADLRLIYLALAHMIKFRGHFLIEGDLNPDNSDVDKLFIQLVQTYNQLFEENPINASGVDAKAILSARLSKSRRLENLIAQLPGEKKNGLFGNLIALSLGLTPNFKSNFDLAEDAKLQLSKDTYDDDLDNLLAQIGDQYADLFLAAKNLSDAILLSDILRVNTEITKAPLSASMIKRYDEHHQDLTLLKALVRQQLPEKYKEIFFDQSKNGYAGYIDGGASQEEFYKFIKPILEKMDGTEELLVKLNREDLLRKQRTFDNGSIPHQIHLGELHAILRRQEDFYPFLKDNREKIEKILTFRIPYYVGPLARGNSRFAWMTRKSEETITPWNFEEVVDKGASAQSFIERMTNFDKNLPNEKVLPKHSLLYEYFTVYNELTKVKYVTEGMRKPAFLSGEQKKAIVDLLFKTNRKVTVKQLKEDYFKKIECFDSVEISGVEDRFNASLGTYHDLLKIIKDKDFLDNEENEDILEDIVLTLTLFEDREMIEERLKTYAHLFDDKVMKQLKRRRYTGWGRLSRKLINGIRDKQSGKTILDFLKSDGFANRNFMQLIHDDSLTFKEDIQKAQVSGQGDSLHEHIANLAGSPAIKKGILQTVKVVDELVKVMGRHKPENIVIEMARENQTTQKGQKNSRERMKRIEEGIKELGSQILKEHPVENTQLQNEKLYLYYLQNGRDMYVDQELDINRLSDYDVDHIVPQSFLKDDSIDNKVLTRSDKNRGKSDNVPSEEVVKKMKNYWRQLLNAKLITQRKFDNLTKAERGGLSELDKAGFIKRQLVETRQITKHVAQILDSRMNTKYDENDKLIREVKVITLKSKLVSDFRKDFQFYKVREINNYHHAHDAYLNAVVGTALIKKYPKLESEFVYGDYKVYDVRKMIAKSEQEIGKATAKYFFYSNIMNFFKTEITLANGEIRKRPLIETNGETGEIVWDKGRDFATVRKVLSMPQVNIVKKTEVQTGGFSKESILPKRNSDKLIARKKDWDPKKYGGFVSPTVAYSVLVVAKVEKGKSKKLKSVKELLGITIMERSSFEKNPIDFLEAKGYKEVKKDLIIKLPKYSLFELENGRKRMLASARELQKGNELALPSKYVNFLYLASHYEKLKGSPEDNEQKQLFVEQHKHYLDEIIEQISEFSKRVILADANLDKVLSAYNKHRDKPIREQAENIIHLFTLTNLGAPAAFKYFDTTIDRKEYRSTKEVLDATLIHQSITGLYETRIDLSQLGGD

SEQ ID NO: 376 - protein, 1359 aa, Artificial Sequence
  Description of Artificial Sequence: Synthetic polypeptide
MDKKYSIGLDIGTNSVGWAVITDDYKVPSKKFKVLGNTDRHSIKKNLIGALLFGSGETAEATRLKRTARRRYTRRKNRICYLQEIFSNEMAKVDDSFFHRLEESFLVEEDKKHERHPIFGNIVDEVAYHEKYPTIYHLRKKLADSTDKADLRLIYLALAHMIKFRGHFLIEGDLNPDNSDVDKLFIQLVQIYNQLFEENPINASRVDAKAILSARLSKSRRLENLIAQLPGEKRNGLFGNLIALSLGLTPNFKSNFDLAEDAKLQLSKDTYDDDLDNLLAQIGDQYADLFLAAKNLSDAILLSDILRVNSEITKAPLSASMIKRYDEHHQDLTLLKALVRQQLPEKYKEIFFDQSKNGYAGYIDGGASQEEFYKFIKPILEKMDGTEELLVKLNREDLLRKQRTFDNGSIPHQIHLGELHAILRRQEDFYPFLKDNREKIEKILTFRIPYYVGPLARGNSRFAWMTRKSEETITPWNFEEVVDKGASAQSFIERMTNFDKNLPNEKVLPKHSLLYEYFTVYNELTKVKYVTEGMRKPAFLSGEQKKAIVDLLFKTNRKVTVKQLKEDYFKKIECFDSVEISGVEDRFNASLGAYHDLLKIIKDKDFLDNEENEDILEDIVLTLTLFEDRGMIEERLKTYAHLFDDKVMKQLKRRRYTGWGRLSRKLINGIRDKQSGKTILDFLKSDGFANRNFMQLIHDDSLTFKEDIQKAQVSGQGHSLHEQIANLAGSPAIKKGILQTVKIVDELVKVMGHKPENIVIEMARENQTTQKGQKNSRERMKRIEEGIKELGSQILKEHPVENTQLQNEKLYLYYLQNGRDMYVDQELDINRLSDYDVDHIVPQSFIKDDSIDNKVLTRSDKNRGKSDNVPSEEVVKKMKNYWRQLLNAKLITQRKFDNLTKAERGGLSELDKAGFIKRQLVETRQITKHVAQILDSRMNTKYDENDKLIREVKVITLKSKLVSDFRKDFQFYKVREINNYHHAHDAYLNAVVGTALIKKYPKLESEFVYGDYKVYDVRKMIAKSEQEIGKATAKYFFYSNIMNFFKTEITLANGEIRKRPLIETNGETGEIVWDKGRDFATVRKVLSMPQVNIVKKTEIQTVGQNGGLFDDNPKSPLEVTPSKLVPLKKELNPKKYGGYQKPTTAYPVLLITDTKQLIPISVMNKKQFEQNPVKFLRDRGYQQVGKNDFIKLPKYTLVDIGDGIKRLWASSKEIHKGNQLVVSKKSQILLYHAHHLDSDLSNDYLQNHNQQFDVLFNEIISFSKKCKLGKEHIQKIENVYSNKKNSASIEELAESFIKLLGFTQLGATSPFNFLGVKLNQKQYKGKKDYILPCTEGTLIRQSITGLYETRVDLSKIGED

SEQ ID NO: 377 - protein, 1129 aa, Alicyclobacillus acido-terrestris; identical to SEQ ID NO: 37

SEQ ID NO: 378 - protein, 1129 aa, Alicyclobacillus acidiphilus; identical to SEQ ID NO: 38

SEQ ID NO: 379 - protein, 1112 aa, Bacillus sp.; identical to SEQ ID NO: 40

SEQ ID NO: 380 - protein, 1140 aa, Bacillus hisashii; identical to SEQ ID NO: 39

SEQ ID NO: 381 - RNA, 120 nt, Artificial Sequence
  Description of Artificial Sequence: Synthetic polynucleotide
aaaaaaaaaaaaaaaaaaaaaaaaaaaaaaaaaaaaaaaaaaaaaaaaaaaaaaaaaaaaaaaaaaaaaaaaaaaaaaaaaaaaaaaaaaaaaaaaaaaaaaaaaaaaaaaaaaaaaaaa

SEQ ID NO: 382 - DNA, 47 bp, Artificial Sequence
  Description of Artificial Sequence: Synthetic oligonucleotide
gggaaataagagagaaaagaagagtaagaagaaatataagagccacc

SEQ ID NO: 383 - DNA, 101 bp, Artificial Sequence
  Description of Artificial Sequence: Synthetic polynucleotide
gctggagcctcggtggccatgcttcttgccccttgggcctccccccagcccctcctccccttcctgcacccgtacccccgtggtctttgaataaagtctga

SEQ ID NO: 384 - DNA, 3420 bp, Artificial Sequence
  Description of Artificial Sequence: Synthetic polynucleotide
atggccccaaagaagaagcggaaggtcggtatccacggagtcccagcagccgccaccagatccttcatcctgaagatcgagcccaacgaggaagtgaagaaaggcctctggaaaacccacgaggtgctgaaccacggaatcgcctactacatgaatatcctgaagctgatccggcaagaggccatctacgagcaccacgagcaggaccccaagaatcccaagaaggtgtccaaggccgagatccaggccgagctgtgggatttcgtgctgaagatgcagaagtgcaacagcttcacacacgaggtggacaaggacgaggtgttcaacatcctgagagagctgtacgaggaactggtgcccagcagcgtggaaaagaagggcgaagccaaccagctgagcaacaagtttctgtaccctctggtggaccccaacagccagtctggaaagggaacagccagcagcggcagaaagcccagatggtacaacctgaagattgccggcgatccctcctgggaagaagagaagaagaagtgggaagaagataagaaaaaggacccgctggccaagatcctgggcaagctggctgagtacggactgatccctctgttcatcccctacaccgacagcaacgagcccatcgtgaaagaaatcaagtggatggaaaagtcccggaaccagagcgtgcggcggctggataaggacatgttcattcaggccctggaacggttcctgagctgggagagctggaacctgaaagtgaaagaggaatacgagaaggtcgagaaagagtacaagaccctggaagagaggatcaaagaggacatccaggctctgaaggctctggaacagtatgagaaagagcggcaagaacagctgctgcgggacaccctgaacaccaacgagtaccggctgagcaagagaggccttagaggctggcgggaaatcatccagaaatggctgaaaatggacgagaacgagccctccgagaagtacctggaagtgttcaaggactaccagcggaagcaccctagagaggccggcgattacagcgtgtacgagttcctgtccaagaaagagaaccacttcatctggcggaatcaccctgagtacccctacctgtacgccaccttctgcgagatcgacaagaaaaagaaggacgccaagcagcaggccaccttcacactggccgatcctatcaatcaccctctgtgggtccgattcgaggaaagaagcggcagcaacctgaacaagtacagaatcctgaccgagcagctgcacaccgagaagctgaagaaaaagctgacagtgcagctggaccggctgatctaccctacagaatctggcggctgggaagagaagggcaaagtggacattgtgctgctgcccagccggcagttctacaaccagatcttcctggacatcgaggaaaagggcaagcacgccttcacctacaaggatgagagcatcaagttccctctgaagggcacactcggcggagccagagtgcagttcgacagagatcacctgagaagataccctcacaaggtggaaagcggcaacgtgggcagaatctacttcaacatgaccgtgaacatcgagcctacagagtccccagtgtccaagtctctgaagatccaccgggacgacttccccaaggtggtcaacttcaagcccaaagaactgaccgagtggatcaaggacagcaagggcaagaaactgaagtccggcatcgagtccctggaaatcggcctgagagtgatgagcatcgacctgggacagagacaggccgctgccgcctctattttcgaggtggtggatcagaagcccgacatcgaaggcaagctgtttttcccaatcaagggcaccgagctgtatgccgtgcacagagccagcttcaacatcaagctgcccggcgagacactggtcaagagcagagaagtgctgcggaaggccagagaggacaatctgaaactgatgaaccagaagctcaacttcctgcggaacgtgctgcacttccagcagttcgaggacatcaccgagagagagaagcgggtcaccaagtggatcagcagacaagagaacagcgacgtgcccctggtgtaccaggatgagctgatccagatccgcgagctgatgtacaagccttacaaggactgggtcgccttcctgaagcagctccacaagagactggaagtcgagatcggcaaagaagtgaagcactggcggaagtccctgagcgacggaagaaagggcctgtacggcatctccctgaagaacatcgacgagatcgatcggacccggaagttcctgctgagatggtccctgaggcctaccgaacctggcgaagtgcgtagactggaacccggccagagattcgccatcgaccagctgaatcacctgaacgccctgaaagaagatcggctgaagaagatggccaacaccatcatcatgcacgccctgggctactgctacgacgtgcggaagaagaaatggcaggctaagaaccccgcctgccagatcatcctgttcgaggatctgagcaactacaacccctacgaggaaaggtcccgcttcgagaacagcaagctcatgaagtggtccagacgcgagatccccagacaggttgcactgcagggcgagatctatggcctgcaagtgggagaagtgggcgctcagttcagcagcagattccacgccaagacaggcagccctggcatcagatgtagcgtcgtgaccaaagagaagctgcaggacaatcggttcttcaagaatctgcagagagagggcagactgaccctggacaaaatcgccgtgctgaaagagggcgatctgtacccagacaaaggcggcgagaagttcatcagcctgagcaaggatcggaagtgcgtgaccacacacgccgacatcaacgccgctcagaacctgcagaagcggttctggacaagaacccacggcttctacaaggtgtactgcaaggcctaccaggtggacggccagaccgtgtacatccctgagagcaaggaccagaagcagaagatcatcgaagagttcggcgagggctacttcattctgaaggacggggtgtacgaatgggtcaacgccggcaagctgaaaatcaagaagggcagctccaagcagagcagcagcgagctggtggatagcgacatcctgaaagacagcttcgacctggcctccgagctgaaaggcgaaaagctgatgctgtacagggaccccagcggcaatgtgttccccagcgacaaatggatggccgctggcgtgttcttcggaaagctggaacgcatcctgatcagcaagctgaccaaccagtactccatcagcaccatcgaggacgacagcagcaagcagtctatgaaaaggccggcggccacgaaaaaggccggccaggcaaaaaagaaaaag

SEQ ID NO: 385 - protein, 18 aa, Artificial Sequence
  Description of Artificial Sequence: Synthetic peptide
KRTADGSEFESPKKKRKV

SEQ ID NO: 386 - protein, 16 aa, Artificial Sequence
  Description of Artificial Sequence: Synthetic peptide
KRPAATKKAGQAKKKK

SEQ ID NO: 387 - protein, 17 aa, Artificial Sequence
  Description of Artificial Sequence: Synthetic peptide
KKTELQTTNAENKTKKL

SEQ ID NO: 388 - protein, 19 aa, Artificial Sequence
  Description of Artificial Sequence: Synthetic peptide
KRGINDRNFWRGENGRKTR

SEQ ID NO: 389 - protein, 23 aa, Artificial Sequence
  Description of Artificial Sequence: Synthetic peptide
RKSGKIAAIVVKRPRKPKKKRKV

SEQ ID NO: 390 - protein, 30 aa, Artificial Sequence; identical to SEQ ID NO: 135
  Description of Artificial Sequence: Synthetic polypeptide

SEQ ID NO: 391 - protein, 16 aa, Artificial Sequence
  Description of Artificial Sequence: Synthetic peptide
KRPAATKKAGQAKKKK

SEQ ID NO: 392 - protein, 29 aa, Artificial Sequence
  Description of Artificial Sequence: Synthetic peptide
PKKKRKVEGADKRTADGSEFESPKKKRKV

SEQ ID NO: 393 - protein, 4 aa, Artificial Sequence
  Description of Artificial Sequence: Synthetic peptide
GGGS

SEQ ID NO: 394 - protein, 5 aa, Artificial Sequence
  Description of Artificial Sequence: Synthetic peptide
GGGGS

SEQ ID NO: 395 - DNA, 21 bp, Artificial Sequence
  Description of Artificial Sequence: Synthetic oligonucleotide
ccagacaggccctggaacccc

SEQ ID NO: 396 - protein, 5 aa, Artificial Sequence
  Description of Artificial Sequence: Synthetic peptide
EAAAK

SEQ ID NO: 397 - protein, 4 aa, Artificial Sequence
  Description of Artificial Sequence: Synthetic peptide
SGGS

SEQ ID NO: 398 - protein, 16 aa, Artificial Sequence
  Description of Artificial Sequence: Synthetic peptide
SGSETPGTSESATPES

SEQ ID NO: 399 - protein, 7 aa, Artificial Sequence
  Description of Artificial Sequence: Synthetic peptide
PDRPWNP

SEQ ID NO: 400 - protein, 21 aa, Artificial Sequence
  Description of Artificial Sequence: Synthetic peptide
  MISC_FEATURE (1)..(21): This sequence may encompass 1, 3, or 7 "Gly Gly Ser" repeating units
GGSGGSGGSGGSGGSGGSGGS

SEQ ID NO: 401 - protein, 16 aa, Artificial Sequence
  Description of Artificial Sequence: Synthetic peptide
SGSETPGTSESATPES

SEQ ID NO: 402 - DNA, 20 bp, Artificial Sequence
  Description of Artificial Sequence: Synthetic oligonucleotide
ccttacctagggacgcagcc

SEQ ID NO: 403 - DNA, 20 bp, Artificial Sequence
  Description of Artificial Sequence: Synthetic oligonucleotide
ggatccccagcgccagctgc

SEQ ID NO: 404 - DNA, 20 bp, Artificial Sequence
  Description of Artificial Sequence: Synthetic oligonucleotide
agcgccagctgccggcctcc

SEQ ID NO: 405 - DNA, 20 bp, Artificial Sequence
  Description of Artificial Sequence: Synthetic oligonucleotide
gcgccagctgccggcctcca

SEQ ID NO: 406 - DNA, 20 bp, Artificial Sequence
  Description of Artificial Sequence: Synthetic oligonucleotide
cctggctcagcgccacgggc

SEQ ID NO: 407 - DNA, 20 bp, Artificial Sequence
  Description of Artificial Sequence: Synthetic oligonucleotide
gctgcaggtgcagacaggtg

SEQ ID NO: 408 - DNA, 20 bp, Artificial Sequence
  Description of Artificial Sequence: Synthetic oligonucleotide
gcggtaccacgtcttgtaga

SEQ ID NO: 409 - DNA, 20 bp, Artificial Sequence
  Description of Artificial Sequence: Synthetic oligonucleotide
tgcctgtgggaacaaacaga

SEQ ID NO: 410 - DNA, 20 bp, Artificial Sequence
  Description of Artificial Sequence: Synthetic oligonucleotide
cttactttcactatcctggg

SEQ ID NO: 411 - DNA, 20 bp, Artificial Sequence
  Description of Artificial Sequence: Synthetic oligonucleotide
tcccttactttcactatcct

SEQ ID NO: 412 - DNA, 20 bp, Artificial Sequence
  Description of Artificial Sequence: Synthetic oligonucleotide
ctcccaggatagtgaaagta

SEQ ID NO: 413 - DNA, 20 bp, Artificial Sequence
  Description of Artificial Sequence: Synthetic oligonucleotide
tgatgtctgaaagggcagag

SEQ ID NO: 414 - DNA, 20 bp, Artificial Sequence
  Description of Artificial Sequence: Synthetic oligonucleotide
tgcccaggagctggtgcgga

SEQ ID NO: 415 - DNA, 20 bp, Artificial Sequence
  Description of Artificial Sequence: Synthetic oligonucleotide
ttgctgccacagaaccagaa

SEQ ID NO: 416 - DNA, 20 bp, Artificial Sequence
  Description of Artificial Sequence: Synthetic oligonucleotide
attcaagggattgaaaaccc

SEQ ID NO: 417 - DNA, 20 bp, Artificial Sequence
  Description of Artificial Sequence: Synthetic oligonucleotide
acctgcccaggggatacccg

SEQ ID NO: 418 - DNA, 20 bp, Artificial Sequence
  Description of Artificial Sequence: Synthetic oligonucleotide
cagcggcagccttctgagtc

SEQ ID NO: 419 - DNA, 20 bp, Artificial Sequence
  Description of Artificial Sequence: Synthetic oligonucleotide
gctacaaacaagctcatctt

SEQ ID NO: 420 - DNA, 20 bp, Artificial Sequence
  Description of Artificial Sequence: Synthetic oligonucleotide
ccagccaagtacgtaagtag

SEQ ID NO: 421 - DNA, 20 bp, Artificial Sequence
  Description of Artificial Sequence: Synthetic oligonucleotide
ctggatatctgtgggacaag

SEQ ID NO: 422 - DNA, 20 bp, Artificial Sequence
  Description of Artificial Sequence: Synthetic oligonucleotide
cttacctgggctggggaaga

SEQ ID NO: 423 - DNA, 20 bp, Artificial Sequence
  Description of Artificial Sequence: Synthetic oligonucleotide
ttcgtatctgtaaaaccaag

SEQ ID NO: 424 - DNA, 20 bp, Artificial Sequence
  Description of Artificial Sequence: Synthetic oligonucleotide
tttcaaaacctgtcagtgat

SEQ ID NO: 425 - DNA, 20 bp, Artificial Sequence
  Description of Artificial Sequence: Synthetic oligonucleotide
ttcaaaacctgtcagtgatt

SEQ ID NO: 426 - DNA, 20 bp, Artificial Sequence
  Description of Artificial Sequence: Synthetic oligonucleotide
ggaccctgcatagagagaga

SEQ ID NO: 427 - DNA, 20 bp, Artificial Sequence
  Description of Artificial Sequence: Synthetic oligonucleotide
tgccccagcagacgggcacg

SEQ ID NO: 428 - DNA, 20 bp, Artificial Sequence
  Description of Artificial Sequence: Synthetic oligonucleotide
gttacctgggccatgtcccc

SEQ ID NO: 429 - DNA, 20 bp, Artificial Sequence
  Description of Artificial Sequence: Synthetic oligonucleotide
cttactgttagatttatatc

SEQ ID NO: 430 - DNA, 20 bp, Artificial Sequence
  Description of Artificial Sequence: Synthetic oligonucleotide
ttactgttagatttatatca

SEQ ID NO: 431 - DNA, 20 bp, Artificial Sequence
  Description of Artificial Sequence: Synthetic oligonucleotide
tttgctatggaaacacaaac

SEQ ID NO: 432 - DNA, 20 bp, Artificial Sequence
  Description of Artificial Sequence: Synthetic oligonucleotide
tccatagcaaatatccacat

SEQ ID NO: 433 - DNA, 20 bp, Artificial Sequence
  Description of Artificial Sequence: Synthetic oligonucleotide
gcagcaaccctcacaacctt

SEQ ID NO: 434 - DNA, 20 bp, Artificial Sequence
  Description of Artificial Sequence: Synthetic oligonucleotide
cagcaaccctcacaaccttt

SEQ ID NO: 435 - DNA, 20 bp, Artificial Sequence
  Description of Artificial Sequence: Synthetic oligonucleotide
aggcaggctcccctcgcctc

SEQ ID NO: 436 - DNA, 20 bp, Artificial Sequence
  Description of Artificial Sequence: Synthetic oligonucleotide
ggagcagcaggaccagcttc

SEQ ID NO: 437 - DNA, 20 bp, Artificial Sequence
  Description of Artificial Sequence: Synthetic oligonucleotide
caggaatacctgagctttct

SEQ ID NO: 438 - DNA, 20 bp, Artificial Sequence
  Description of Artificial Sequence: Synthetic oligonucleotide
aggttccagattccattgct

SEQ ID NO: 439 - DNA, 20 bp, Artificial Sequence
  Description of Artificial Sequence: Synthetic oligonucleotide
ctgggcccaggggctgaggc

SEQ ID NO: 440 - DNA, 20 bp, Artificial Sequence
  Description of Artificial Sequence: Synthetic oligonucleotide
gatcgagtggccccaggtcc

SEQ ID NO: 441 - DNA, 20 bp, Artificial Sequence
  Description of Artificial Sequence: Synthetic oligonucleotide
tcacccgacttctgaacgtg

SEQ ID NO: 442 - DNA, 20 bp, Artificial Sequence
  Description of Artificial Sequence: Synthetic oligonucleotide
ttacctgcccactgttagcc

SEQ ID NO: 443 - DNA, 20 bp, Artificial Sequence
  Description of Artificial Sequence: Synthetic oligonucleotide
gaagccacaggaagtctgtg

SEQ ID NO: 444 - DNA, 20 bp, Artificial Sequence
  Description of Artificial Sequence: Synthetic oligonucleotide
actccagttcctgacggctg

SEQ ID NO: 445 - DNA, 20 bp, Artificial Sequence
  Description of Artificial Sequence: Synthetic oligonucleotide
acctacaggagtacctgacg

SEQ ID NO: 446 - DNA, 20 bp, Artificial Sequence
  Description of Artificial Sequence: Synthetic oligonucleotide
ttcccagagcaccagagcca

SEQ ID NO: 447 - DNA, 20 bp, Artificial Sequence
  Description of Artificial Sequence: Synthetic oligonucleotide
acgttcagaagtcgggtgag

SEQ ID NO: 448 - DNA, 20 bp, Artificial Sequence
  Description of Artificial Sequence: Synthetic oligonucleotide
ttcagagcagtttgagacag

SEQ ID NO: 449 - DNA, 20 bp, Artificial Sequence
  Description of Artificial Sequence: Synthetic oligonucleotide
tcacccgacttctgaacgtg

SEQ ID NO: 450 - DNA, 20 bp, Artificial Sequence
  Description of Artificial Sequence: Synthetic oligonucleotide
acgttcagaagtcgggtgag

SEQ ID NO: 451 - DNA, 20 bp, Artificial Sequence
  Description of Artificial Sequence: Synthetic oligonucleotide
tttactatgtctcagtggat

SEQ ID NO: 452 - DNA, 20 bp, Artificial Sequence
  Description of Artificial Sequence: Synthetic oligonucleotide
ctttactatgtctcagtgga

SEQ ID NO: 453 - DNA, 20 bp, Artificial Sequence
  Description of Artificial Sequence: Synthetic oligonucleotide
gaagccacaggaagtctgtg

SEQ ID NO: 454 - DNA, 20 bp, Artificial Sequence
  Description of Artificial Sequence: Synthetic oligonucleotide
ttacctgcccactgttagcc

SEQ ID NO: 455 - DNA, 20 bp, Artificial Sequence
  Description of Artificial Sequence: Synthetic oligonucleotide
ttcagagcagtttgagacag

SEQ ID NO: 456 - DNA, 20 bp, Artificial Sequence
  Description of Artificial Sequence: Synthetic oligonucleotide
actccagttcctgacggctg

SEQ ID NO: 457 - DNA, 20 bp, Artificial Sequence
  Description of Artificial Sequence: Synthetic oligonucleotide
acctacaggagtacctgacg

SEQ ID NO: 458 - DNA, 20 bp, Artificial Sequence
  Description of Artificial Sequence: Synthetic oligonucleotide
ttcccagagcaccagagcca

SEQ ID NO: 459 - DNA, 20 bp, Artificial Sequence
  Description of Artificial Sequence: Synthetic oligonucleotide
agccagaagctgggaatttc

SEQ ID NO: 460 - DNA, 20 bp, Artificial Sequence
  Description of Artificial Sequence: Synthetic oligonucleotide
tatcatgtcgttattaactg

SEQ ID NO: 461 - DNA, 20 bp, Artificial Sequence
  Description of Artificial Sequence: Synthetic oligonucleotide
cctgctgggaaacagacaac

SEQ ID NO: 462 - DNA, 20 bp, Artificial Sequence
  Description of Artificial Sequence: Synthetic oligonucleotide
cactcacagtctagggtggc

SEQ ID NO: 463 - DNA, 20 bp, Artificial Sequence
  Description of Artificial Sequence: Synthetic oligonucleotide
caaccggcagcgagggaacg

SEQ ID NO: 464 - DNA, 20 bp, Artificial Sequence
  Description of Artificial Sequence: Synthetic oligonucleotide
acagggctggggcaggacag

SEQ ID NO: 465 - DNA, 20 bp, Artificial Sequence
  Description of Artificial Sequence: Synthetic oligonucleotide
catccaccagctcgcagcac

SEQ ID NO: 466 - DNA, 20 bp, Artificial Sequence
  Description of Artificial Sequence: Synthetic oligonucleotide
atccaccagctcgcagcaca

SEQ ID NO: 467 - DNA, 20 bp, Artificial Sequence
  Description of Artificial Sequence: Synthetic oligonucleotide
tccaccagctcgcagcacag

SEQ ID NO: 468 - DNA, 20 bp, Artificial Sequence
  Description of Artificial Sequence: Synthetic oligonucleotide
ccaccagctcgcagcacagg

SEQ ID NO: 469 - DNA, 20 bp, Artificial Sequence
  Description of Artificial Sequence: Synthetic oligonucleotide
tgtcacctggcaggaggagg

SEQ ID NO: 470 - DNA, 20 bp, Artificial Sequence
  Description of Artificial Sequence: Synthetic oligonucleotide
gtcacctggcaggaggaggc

SEQ ID NO: 471 - DNA, 20 bp, Artificial Sequence
  Description of Artificial Sequence: Synthetic oligonucleotide
ggcaccctgcagggagaaga

SEQ ID NO: 472 - DNA, 20 bp, Artificial Sequence
  Description of Artificial Sequence: Synthetic oligonucleotide
gcaccctgcagggagaagaa

SEQ ID NO: 473 - DNA, 20 bp, Artificial Sequence
  Description of Artificial Sequence: Synthetic oligonucleotide
attctgtcgtgggtaggggc

SEQ ID NO: 474 - DNA, 20 bp, Artificial Sequence
  Description of Artificial Sequence: Synthetic oligonucleotide
ctccattctgtcgtgggtag

SEQ ID NO: 475 - DNA, 20 bp, Artificial Sequence
  Description of Artificial Sequence: Synthetic oligonucleotide
cctcgggctgcaaaggagag

SEQ ID NO: 476 - DNA, 20 bp, Artificial Sequence
  Description of Artificial Sequence: Synthetic oligonucleotide
cgggctgcaaaggagagggg

SEQ ID NO: 477 - DNA, 20 bp, Artificial Sequence
  Description of Artificial Sequence: Synthetic oligonucleotide
gctgacctttccggtatccc

SEQ ID NO: 478 - DNA, 20 bp, Artificial Sequence
  Description of Artificial Sequence: Synthetic oligonucleotide
ctgacctttccggtatccca

SEQ ID NO: 479 - DNA, 20 bp, Artificial Sequence
  Description of Artificial Sequence: Synthetic oligonucleotide
tgttgcactgagatggggca

SEQ ID NO: 480 - DNA, 20 bp, Artificial Sequence
  Description of Artificial Sequence: Synthetic oligonucleotide
ctgttgcactgagatggggc

SEQ ID NO: 481 - DNA, 20 bp, Artificial Sequence
  Description of Artificial Sequence: Synthetic oligonucleotide
gccctgcagcccccagaacc

SEQ ID NO: 482 - DNA, 20 bp, Artificial Sequence
  Description of Artificial Sequence: Synthetic oligonucleotide
ctcacccgcagtgacacaca

SEQ ID NO: 483 - DNA, 20 bp, Artificial Sequence
  Description of Artificial Sequence: Synthetic oligonucleotide
gcagcacccagggcaggacc

SEQ ID NO: 484 - DNA, 20 bp, Artificial Sequence
  Description of Artificial Sequence: Synthetic oligonucleotide
cagcacccagggcaggacca

SEQ ID NO: 485 - DNA, 20 bp, Artificial Sequence
  Description of Artificial Sequence: Synthetic oligonucleotide
gtccctgtggaacagcagca

SEQ ID NO: 486 - DNA, 20 bp, Artificial Sequence
  Description of Artificial Sequence: Synthetic oligonucleotide
gtgggttcaagttcggatgg

SEQ ID NO: 487 - DNA, 20 bp, Artificial Sequence
  Description of Artificial Sequence: Synthetic oligonucleotide
gccccacctgggtctgagct

SEQ ID NO: 488 - DNA, 20 bp, Artificial Sequence
  Description of Artificial Sequence: Synthetic oligonucleotide
ggccccacctgggtctgagc

SEQ ID NO: 489 - DNA, 20 bp, Artificial Sequence
  Description of Artificial Sequence: Synthetic oligonucleotide
ccacctgggtctgagctggg

SEQ ID NO: 490 - DNA, 20 bp, Artificial Sequence
  Description of Artificial Sequence: Synthetic oligonucleotide
aggcctcccaggagccctca

SEQ ID NO: 491 - DNA, 20 bp, Artificial Sequence
  Description of Artificial Sequence: Synthetic oligonucleotide
ctcccaggagccctcaggga

SEQ ID NO: 492 - DNA, 20 bp, Artificial Sequence
  Description of Artificial Sequence: Synthetic oligonucleotide
cccccagctcacagtcacca

SEQ ID NO: 493 - DNA, 20 bp, Artificial Sequence
  Description of Artificial Sequence: Synthetic oligonucleotide
ggtctcaccggtgcttatgt

SEQ ID NO: 494 - DNA, 20 bp, Artificial Sequence
  Description of Artificial Sequence: Synthetic oligonucleotide
tgctgcgccgacataagcac

SEQ ID NO: 495 - DNA, 20 bp, Artificial Sequence
  Description of Artificial Sequence: Synthetic oligonucleotide
ggcagggctgggagagagca

SEQ ID NO: 496 - DNA, 20 bp, Artificial Sequence
  Description of Artificial Sequence: Synthetic oligonucleotide
cgagagcacgagcatgggtg

SEQ ID NO: 497 - DNA, 20 bp, Artificial Sequence
  Description of Artificial Sequence: Synthetic oligonucleotide
gagcacgagcatgggtgagg

SEQ ID NO: 498 - DNA, 20 bp, Artificial Sequence
  Description of Artificial Sequence: Synthetic oligonucleotide
agcacgagcatgggtgagga

SEQ ID NO: 499 - DNA, 20 bp, Artificial Sequence
  Description of Artificial Sequence: Synthetic oligonucleotide
gcacgagcatgggtgaggag

SEQ ID NO: 500 - DNA, 20 bp, Artificial Sequence
  Description of Artificial Sequence: Synthetic oligonucleotide
ctcacccatgctcgtgctct

SEQ ID NO: 501 - DNA, 20 bp, Artificial Sequence
  Description of Artificial Sequence: Synthetic oligonucleotide
ggtgcctgcgcgggggaagg

SEQ ID NO: 502 - DNA, 20 bp, Artificial Sequence
  Description of Artificial Sequence: Synthetic oligonucleotide
gtgcctgcgcgggggaagga

SEQ ID NO: 503 - DNA, 20 bp, Artificial Sequence
  Description of Artificial Sequence: Synthetic oligonucleotide
cttggtgcctgcgcggggga

SEQ ID NO: 504 - DNA, 20 bp, Artificial Sequence
  Description of Artificial Sequence: Synthetic oligonucleotide
ggccccagggccctgccgcc

SEQ ID NO: 505 - DNA, 20 bp, Artificial Sequence
  Description of Artificial Sequence: Synthetic oligonucleotide
tctacgctcaggcaggggag

SEQ ID NO: 506 - DNA, 20 bp, Artificial Sequence
  Description of Artificial Sequence: Synthetic oligonucleotide
ccaccaggacggccccccat

SEQ ID NO: 507 - DNA, 20 bp, Artificial Sequence
  Description of Artificial Sequence: Synthetic oligonucleotide
aggcccaggcggcagggccc

SEQ ID NO: 508 - DNA, 20 bp, Artificial Sequence
  Description of Artificial Sequence: Synthetic oligonucleotide
ggcccaggcggcagggccct

SEQ ID NO: 509 - DNA, 20 bp, Artificial Sequence
  Description of Artificial Sequence: Synthetic oligonucleotide
acgactggccagggcgcctg

SEQ ID NO: 510 - DNA, 20 bp, Artificial Sequence
  Description of Artificial Sequence: Synthetic oligonucleotide
caccgcccagacgactggcc

SEQ ID NO: 511 - DNA, 20 bp, Artificial Sequence
  Description of Artificial Sequence: Synthetic oligonucleotide
ctacaactgggctggcggcc

SEQ ID NO: 512 - DNA, 20 bp, Artificial Sequence
  Description of Artificial Sequence: Synthetic oligonucleotide
cacctacctaagaaccatcc

SEQ ID NO: 513 - DNA, 20 bp, Artificial Sequence
  Description of Artificial Sequence: Synthetic oligonucleotide
ggagtctgagagatggagag

SEQ ID NO: 514 - DNA, 20 bp, Artificial Sequence
  Description of Artificial Sequence: Synthetic oligonucleotide
cagcaaccagacggacaagc

SEQ ID NO: 515 - DNA, 20 bp, Artificial Sequence
  Description of Artificial Sequence: Synthetic oligonucleotide
gtgtcacacaactgcccaac

SEQ ID NO: 516 - DNA, 20 bp, Artificial Sequence
  Description of Artificial Sequence: Synthetic oligonucleotide
agccggccagttccaaaccc

SEQ ID NO: 517 - DNA, 20 bp, Artificial Sequence
  Description of Artificial Sequence: Synthetic oligonucleotide
cagttccaaaccctggtggt

SEQ ID NO: 518 - DNA, 20 bp, Artificial Sequence
  Description of Artificial Sequence: Synthetic oligonucleotide
cggccagttccaaaccctgg

SEQ ID NO: 519 - DNA, 20 bp, Artificial Sequence
  Description of Artificial Sequence: Synthetic oligonucleotide
ggacccagactagcagcacc

SEQ ID NO: 520 - DNA, 20 bp, Artificial Sequence
  Description of Artificial Sequence: Synthetic oligonucleotide
gacgttacctcgtgcggccc

SEQ ID NO: 521 - DNA, 20 bp, Artificial Sequence
  Description of Artificial Sequence: Synthetic oligonucleotide
tccctgcagagaaacacact

SEQ ID NO: 522 - DNA, 20 bp, Artificial Sequence
  Description of Artificial Sequence: Synthetic oligonucleotide
gagactcaccaggggctggc

SEQ ID NO: 523 - DNA, 20 bp, Artificial Sequence
  Description of Artificial Sequence: Synthetic oligonucleotide
cctccttctttgaggagaaa

SEQ ID NO: 524 - DNA, 20 bp, Artificial Sequence
  Description of Artificial Sequence: Synthetic oligonucleotide
ggggttccagggcctgtctg

SEQ ID NO: 525 - DNA, 20 bp, Artificial Sequence
  Description of Artificial Sequence: Synthetic oligonucleotide
ttctctctggaagggcacaa

SEQ ID NO: 526 - DNA, 20 bp, Artificial Sequence
  Description of Artificial Sequence: Synthetic oligonucleotide
ccagtggcgagagaagaccc

SEQ ID NO: 527 - DNA, 20 bp, Artificial Sequence
  Description of Artificial Sequence: Synthetic oligonucleotide
tgcccagccactgaggcctg

SEQ ID NO: 528 - DNA, 20 bp, Artificial Sequence
  Description of Artificial Sequence: Synthetic oligonucleotide
cgactggccagggcgcctgt

SEQ ID NO: 529 - DNA, 20 bp, Artificial Sequence
  Description of Artificial Sequence: Synthetic oligonucleotide
accgcccagacgactggcca

SEQ ID NO: 530 - DNA, 20 bp, Artificial Sequence
  Description of Artificial Sequence: Synthetic oligonucleotide
gtttctgcagccgctttggg

SEQ ID NO: 531 - DNA, 20 bp, Artificial Sequence
  Description of Artificial Sequence: Synthetic oligonucleotide
ttacctggagccacccaaag

SEQ ID NO: 532 - DNA, 20 bp, Artificial Sequence
  Description of Artificial Sequence: Synthetic oligonucleotide
tcactaggtgagcaaaagag

SEQ ID NO: 533 - DNA, 20 bp, Artificial Sequence
  Description of Artificial Sequence: Synthetic oligonucleotide
gcctctccagccaggggctg

SEQ ID NO: 534 - DNA, 20 bp, Artificial Sequence
  Description of Artificial Sequence: Synthetic oligonucleotide
cttggcagcatcagccagac

SEQ ID NO: 535 - DNA, 20 bp, Artificial Sequence
  Description of Artificial Sequence: Synthetic oligonucleotide
ccactgggcgggaaagagaa

SEQ ID NO: 536 - DNA, 20 bp, Artificial Sequence
  Description of Artificial Sequence: Synthetic oligonucleotide
acatactcgaggcctggccc

SEQ ID NO: 537 - DNA, 20 bp, Artificial Sequence
  Description of Artificial Sequence: Synthetic oligonucleotide
cctgcagccccgcgtccagc

SEQ ID NO: 538 - DNA, 20 bp, Artificial Sequence
  Description of Artificial Sequence: Synthetic oligonucleotide
cgcgtccagctggatgagcg

SEQ ID NO: 539 - DNA, 20 bp, Artificial Sequence
  Description of Artificial Sequence: Synthetic oligonucleotide
tgggccaggcctcgagtatg

SEQ ID NO: 540 - DNA, 20 bp, Artificial Sequence
  Description of Artificial Sequence: Synthetic oligonucleotide
gggagttacccagaacagtg

SEQ ID NO: 541 - DNA, 20 bp, Artificial Sequence
  Description of Artificial Sequence: Synthetic oligonucleotide
cctgccccaagtcagcccca

SEQ ID NO: 542 - DNA, 20 bp, Artificial Sequence
  Description of Artificial Sequence: Synthetic oligonucleotide
gccagggccgagtccctgtc

SEQ ID NO: 543 - DNA, 20 bp, Artificial Sequence
  Description of Artificial Sequence: Synthetic oligonucleotide
ccagggccgagtccctgtcc

SEQ ID NO: 544 - DNA, 20 bp, Artificial Sequence
  Description of Artificial Sequence: Synthetic oligonucleotide
gccccagggcccagagtcca

SEQ ID NO: 545 - DNA, 20 bp, Artificial Sequence
  Description of Artificial Sequence: Synthetic oligonucleotide
atgtgagccaggcccaggct

SEQ ID NO: 546 - DNA, 20 bp, Artificial Sequence
  Description of Artificial Sequence: Synthetic oligonucleotide
gaggagtccacttggcagtg

SEQ ID NO: 547 - DNA, 20 bp, Artificial Sequence
  Description of Artificial Sequence: Synthetic oligonucleotide
gagtcactgaaaagagtaga

SEQ ID NO: 548 - DNA, 20 bp, Artificial Sequence
  Description of Artificial Sequence: Synthetic oligonucleotide
ctggacaagaacgctttgtg

SEQ ID NO: 549 - DNA, 20 bp, Artificial Sequence
  Description of Artificial Sequence: Synthetic oligonucleotide
ccatcccagaggagtttctc

SEQ ID NO: 550 - DNA, 20 bp, Artificial Sequence
  Description of Artificial Sequence: Synthetic oligonucleotide
tggcaatgccagctgtacca

SEQ ID NO: 551 - DNA, 20 bp, Artificial Sequence
  Description of Artificial Sequence: Synthetic oligonucleotide
taccagggggagaggcttct

SEQ ID NO: 552 - DNA, 20 bp, Artificial Sequence
  Description of Artificial Sequence: Synthetic oligonucleotide
ggcattgccaaggctgggaa

SEQ ID NO: 553 - DNA, 20 bp, Artificial Sequence
  Description of Artificial Sequence: Synthetic oligonucleotide
ggcacctatggagaaagtac

SEQ ID NO: 554 - DNA, 20 bp, Artificial Sequence
  Description of Artificial Sequence: Synthetic oligonucleotide
agacaggtgagccagggaca

SEQ ID NO: 555 - DNA, 20 bp, Artificial Sequence
  Description of Artificial Sequence: Synthetic oligonucleotide
ggctcacctgtcttctccaa

SEQ ID NO: 556 - DNA, 20 bp, Artificial Sequence
  Description of Artificial Sequence: Synthetic oligonucleotide
gtcgccactgtgagaagaga

SEQ ID NO: 557 - DNA, 20 bp, Artificial Sequence
  Description of Artificial Sequence: Synthetic oligonucleotide
gcaggctcagagcaagatag

SEQ ID NO: 558 - DNA, 20 bp, Artificial Sequence
  Description of Artificial Sequence: Synthetic oligonucleotide
gctggagcaagaaccggagc

SEQ ID NO: 559 - DNA, 20 bp, Artificial Sequence
  Description of Artificial Sequence: Synthetic oligonucleotide
actcacctttgcagaagaca

SEQ ID NO: 560 - DNA, 20 bp, Artificial Sequence
  Description of Artificial Sequence: Synthetic oligonucleotide
cactcacctttgcagaagac

SEQ ID NO: 561 - DNA, 20 bp, Artificial Sequence
  Description of Artificial Sequence: Synthetic oligonucleotide
agggccaggtcctggtagcc

SEQ ID NO: 562 - DNA, 20 bp, Artificial Sequence
  Description of Artificial Sequence: Synthetic oligonucleotide
ggcccagcctgctgtggtac

SEQ ID NO: 563 - DNA, 20 bp, Artificial Sequence
  Description of Artificial Sequence: Synthetic oligonucleotide
gcttcggcaggctgacagcc

SEQ ID NO: 564 - DNA, 20 bp, Artificial Sequence
  Description of Artificial Sequence: Synthetic oligonucleotide
tatccaaggactgagggcca

SEQ ID NO: 565 - DNA, 20 bp, Artificial Sequence
  Description of Artificial Sequence: Synthetic oligonucleotide
ggaacccagatttatgtaat

SEQ ID NO: 566 - DNA, 20 bp, Artificial Sequence
  Description of Artificial Sequence: Synthetic oligonucleotide
gctcaccaattacataaatc

SEQ ID NO: 567 - DNA, 20 bp, Artificial Sequence
  Description of Artificial Sequence: Synthetic oligonucleotide
ctcaccaattacataaatct

SEQ ID NO: 568 - DNA, 20 bp, Artificial Sequence
  Description of Artificial Sequence: Synthetic oligonucleotide
ctcagctgaacctggctacc

SEQ ID NO: 569 - DNA, 20 bp, Artificial Sequence
  Description of Artificial Sequence: Synthetic oligonucleotide
ggcgtctcaaacaggtatct

SEQ ID NO: 570 - DNA, 20 bp, Artificial Sequence
  Description of Artificial Sequence: Synthetic oligonucleotide
caaagcctgaagagaaatcc

SEQ ID NO: 571 - DNA, 20 bp, Artificial Sequence
  Description of Artificial Sequence: Synthetic oligonucleotide
agagcctgaaggagaagtct

SEQ ID NO: 572 - DNA, 20 bp, Artificial Sequence
  Description of Artificial Sequence: Synthetic oligonucleotide
tcccagtaccgggaaggcga

SEQ ID NO: 573 - DNA, 20 bp, Artificial Sequence
  Description of Artificial Sequence: Synthetic oligonucleotide
ggttcctgtggagcacaggg

SEQ ID NO: 574 - DNA, 20 bp, Artificial Sequence
  Description of Artificial Sequence: Synthetic oligonucleotide
tggggttcctgtggagcaca

SEQ ID NO: 575 - DNA, 20 bp, Artificial Sequence
  Description of Artificial Sequence: Synthetic oligonucleotide
tcatttcctagatgggagac

SEQ ID NO: 576 - DNA, 20 bp, Artificial Sequence
  Description of Artificial Sequence: Synthetic oligonucleotide
ttcctagatgggagacaggc

SEQ ID NO: 577 - DNA, 20 bp, Artificial Sequence
  Description of Artificial Sequence: Synthetic oligonucleotide
ccaggtgtctgaggaggaag

SEQ ID NO: 578 - DNA, 20 bp, Artificial Sequence
  Description of Artificial Sequence: Synthetic oligonucleotide
gtgtctgaggaggaagggga

SEQ ID NO: 579 - DNA, 20 bp, Artificial Sequence
  Description of Artificial Sequence: Synthetic oligonucleotide
tagtcctgggtggggtaggg

SEQ ID NO: 580 - DNA, 20 bp, Artificial Sequence
  Description of Artificial Sequence: Synthetic oligonucleotide
agtcctgggtggggtagggt

SEQ ID NO: 581 - DNA, 20 bp, Artificial Sequence
  Description of Artificial Sequence: Synthetic oligonucleotide
cattacctcatagtaggcaa

SEQ ID NO: 582 - DNA, 20 bp, Artificial Sequence
  Description of Artificial Sequence: Synthetic oligonucleotide
ccattacctcatagtaggca

SEQ ID NO: 583 - DNA, 20 bp, Artificial Sequence
  Description of Artificial Sequence: Synthetic oligonucleotide
acagatctgagcagataaca

SEQ ID NO: 584 - DNA, 20 bp, Artificial Sequence
  Description of Artificial Sequence: Synthetic oligonucleotide
tcctacccactggttgccct

SEQ ID NO: 585 - DNA, 20 bp, Artificial Sequence
  Description of Artificial Sequence: Synthetic oligonucleotide
aggtgcagtacctgaaggac

SEQ ID NO: 586 - DNA, 20 bp, Artificial Sequence
  Description of Artificial Sequence: Synthetic oligonucleotide
caggcagctggcgggcgcca

SEQ ID NO: 587 - DNA, 20 bp, Artificial Sequence
  Description of Artificial Sequence: Synthetic oligonucleotide
gacttccagggctccttctg

SEQ ID NO: 588 - DNA, 20 bp, Artificial Sequence
  Description of Artificial Sequence: Synthetic oligonucleotide
catccagatacattttgtca

SEQ ID NO: 589 - DNA, 20 bp, Artificial Sequence
  Description of Artificial Sequence: Synthetic oligonucleotide
acctgccaaacacagacagt

SEQ ID NO: 590 - DNA, 20 bp, Artificial Sequence
  Description of Artificial Sequence: Synthetic oligonucleotide
cgtgcagatgcaatggtcca

SEQ ID NO: 591 - DNA, 20 bp, Artificial Sequence
  Description of Artificial Sequence: Synthetic oligonucleotide
tgtaactgtaacaaaacata

SEQ ID NO: 592 - DNA, 20 bp, Artificial Sequence
  Description of Artificial Sequence: Synthetic oligonucleotide
acttaccaccgaccatgcat

SEQ ID NO: 593 - DNA, 20 bp, Artificial Sequence
  Description of Artificial Sequence: Synthetic oligonucleotide
cttaccaaaaaccttgactg

SEQ ID NO: 594 - DNA, 20 bp, Artificial Sequence
  Description of Artificial Sequence: Synthetic oligonucleotide
ccagtccaaatcttcgatga

SEQ ID NO: 595 - DNA, 20 bp, Artificial Sequence
  Description of Artificial Sequence: Synthetic oligonucleotide
cagtccaaatcttcgatgat

SEQ ID NO: 596 - DNA, 20 bp, Artificial Sequence
  Description of Artificial Sequence: Synthetic oligonucleotide
aaaccatgtgatatttgctt

SEQ ID NO: 597 - DNA, 20 bp, Artificial Sequence
  Description of Artificial Sequence: Synthetic oligonucleotide
atgttccacactttatttcc

SEQ ID NO: 598 - DNA, 20 bp, Artificial Sequence
  Description of Artificial Sequence: Synthetic oligonucleotide
tcacgttgaggagtggtgtt

SEQ ID NO: 599 - DNA, 20 bp, Artificial Sequence
  Description of Artificial Sequence: Synthetic oligonucleotide
cattgtctagggatataaag

SEQ ID NO: 600 - DNA, 20 bp, Artificial Sequence
  Description of Artificial Sequence: Synthetic oligonucleotide
acattgtctagggatataaa

SEQ ID NO: 601 - DNA, 20 bp, Artificial Sequence
  Description of Artificial Sequence: Synthetic oligonucleotide
gacattgtctagggatataa

SEQ ID NO: 602 - DNA, 20 bp, Artificial Sequence
  Description of Artificial Sequence: Synthetic oligonucleotide
tggccaggacattccatctt

SEQ ID NO: 603 - DNA, 20 bp, Artificial Sequence
  Description of Artificial Sequence: Synthetic oligonucleotide
ccattctaggaacaaaatat

SEQ ID NO: 604 - DNA, 20 bp, Artificial Sequence
  Description of Artificial Sequence: Synthetic oligonucleotide
gagcttccaagtcttctcca

SEQ ID NO: 605 - DNA, 20 bp, Artificial Sequence
  Description of Artificial Sequence: Synthetic oligonucleotide
tccccgaaaaggtcgaattt

SEQ ID NO: 606 - DNA, 20 bp, Artificial Sequence
  Description of Artificial Sequence: Synthetic oligonucleotide
atgaagaacagtcacaggac

SEQ ID NO: 607 - DNA, 20 bp, Artificial Sequence
  Description of Artificial Sequence: Synthetic oligonucleotide
gatttcgtctgtaggcacaa

SEQ ID NO: 608 - DNA, 20 bp, Artificial Sequence
  Description of Artificial Sequence: Synthetic oligonucleotide
taaacttacctgaaacagcc

SEQ ID NO: 609 - DNA, 20 bp, Artificial Sequence
  Description of Artificial Sequence: Synthetic oligonucleotide
attcagacagtgccttcatg

SEQ ID NO: 610 - DNA, 20 bp, Artificial Sequence
  Description of Artificial Sequence: Synthetic oligonucleotide
gttgcactcgattgggacag

SEQ ID NO: 611 - DNA, 20 bp, Artificial Sequence
  Description of Artificial Sequence: Synthetic oligonucleotide
ttatttcaagccctgattga

SEQ ID NO: 612 - DNA, 20 bp, Artificial Sequence
  Description of Artificial Sequence: Synthetic oligonucleotide
ttacctgtgtaacttttata

SEQ ID NO: 613 - DNA, 20 bp, Artificial Sequence
  Description of Artificial Sequence: Synthetic oligonucleotide
attgttcctggaatttgggg

SEQ ID NO: 614 - DNA, 20 bp, Artificial Sequence
  Description of Artificial Sequence: Synthetic oligonucleotide
attatacctgccatgccgta

SEQ ID NO: 615 - DNA, 20 bp, Artificial Sequence
  Description of Artificial Sequence: Synthetic oligonucleotide
gttcctggaatttggggagg

SEQ ID NO: 616 - DNA, 20 bp, Artificial Sequence
  Description of Artificial Sequence: Synthetic oligonucleotide
ctgccatgccgtaaggcaag

SEQ ID NO: 617 - DNA, 20 bp, Artificial Sequence
  Description of Artificial Sequence: Synthetic oligonucleotide
tctacctttggtgaacccgt

SEQ ID NO: 618 - DNA, 20 bp, Artificial Sequence
  Description of Artificial Sequence: Synthetic oligonucleotide
cttaccttagctccttctaa

SEQ ID NO: 619 - DNA, 20 bp, Artificial Sequence
  Description of Artificial Sequence: Synthetic oligonucleotide
gggatgtcgactcctagggg

SEQ ID NO: 620 - DNA, 20 bp, Artificial Sequence
  Description of Artificial Sequence: Synthetic oligonucleotide
cgagggcaccatgcttcaag

SEQ ID NO: 621 - DNA, 20 bp, Artificial Sequence
  Description of Artificial Sequence: Synthetic oligonucleotide
aaactcactttatgctaggg

SEQ ID NO: 622 - DNA, 20 bp, Artificial Sequence
  Description of Artificial Sequence: Synthetic oligonucleotide
ctcactttatgctagggagg

SEQ ID NO: 623 - DNA, 20 bp, Artificial Sequence
  Description of Artificial Sequence: Synthetic oligonucleotide
cttcacctgcatttaaagaa

SEQ ID NO: 624 - DNA, 20 bp, Artificial Sequence
  Description of Artificial Sequence: Synthetic oligonucleotide
ccaccagattagctctggcc

SEQ ID NO: 625 - DNA, 20 bp, Artificial Sequence
  Description of Artificial Sequence: Synthetic oligonucleotide
ctacctttggtgaacccgtt

SEQ ID NO: 626 - DNA, 20 bp, Artificial Sequence
  Description of Artificial Sequence: Synthetic oligonucleotide
atgttccagatgtccagata

SEQ ID NO: 627 - DNA, 20 bp, Artificial Sequence
  Description of Artificial Sequence: Synthetic oligonucleotide
tgttccagatgtccagatat

SEQ ID NO: 628 - DNA, 20 bp, Artificial Sequence
  Description of Artificial Sequence: Synthetic oligonucleotide
agatagacaaacaagttgga

SEQ ID NO: 629 - DNA, 20 bp, Artificial Sequence
  Description of Artificial Sequence: Synthetic oligonucleotide
agcttgcaccaagtcacatg

SEQ ID NO: 630 - DNA, 20 bp, Artificial Sequence
  Description of Artificial Sequence: Synthetic oligonucleotide
acccaccttggtgccttctc

SEQ ID NO: 631 - DNA, 20 bp, Artificial Sequence
  Description of Artificial Sequence: Synthetic oligonucleotide
actcacgctggatagcctcc

SEQ ID NO: 632 - DNA, 20 bp, Artificial Sequence
  Description of Artificial Sequence: Synthetic oligonucleotide
tggagtacctgaggaatatc

SEQ ID NO: 633 - DNA, 20 bp, Artificial Sequence
  Description of Artificial Sequence: Synthetic oligonucleotide
ttaccccacttaactatctt

SEQ ID NO: 634 - DNA, 20 bp, Artificial Sequence
  Description of Artificial Sequence: Synthetic oligonucleotide
tcgatctatgaaaaagacag

SEQ ID NO: 635 - DNA, 18 bp, Artificial Sequence
  Description of Artificial Sequence: Synthetic oligonucleotide
taccccacttaactatct

SEQ ID NO: 636 - DNA, 20 bp, Artificial Sequence
  Description of Artificial Sequence: Synthetic oligonucleotide
actcacgctggatagcctcc

SEQ ID NO: 637 - DNA, 20 bp, Artificial Sequence
  Description of Artificial Sequence: Synthetic oligonucleotide
ctcaggtactccaaagattc

SEQ ID NO: 638 - DNA, 20 bp, Artificial Sequence
  Description of Artificial Sequence: Synthetic oligonucleotide
cttaccccacttaactatct

SEQ ID NO: 639 - DNA, 20 bp, Artificial Sequence
  Description of Artificial Sequence: Synthetic oligonucleotide
catttgccagacagaacctc

SEQ ID NO: 640 - DNA, 20 bp, Artificial Sequence
  Description of Artificial Sequence: Synthetic oligonucleotide
aaacaagaccaaaaggctaa

SEQ ID NO: 641 - DNA, 20 bp, Artificial Sequence
  Description of Artificial Sequence: Synthetic oligonucleotide
gtaagccaagaaagaaatcc

SEQ ID NO: 642 - DNA, 20 bp, Artificial Sequence
  Description of Artificial Sequence: Synthetic oligonucleotide
gcttcagattctgaatgagc

SEQ ID NO: 643 - DNA, 20 bp, Artificial Sequence
  Description of Artificial Sequence: Synthetic oligonucleotide
ttaaaacaaaatgaaatgaa

SEQ ID NO: 644 - DNA, 20 bp, Artificial Sequence
  Description of Artificial Sequence: Synthetic oligonucleotide
gttcctcagcttccttcaga

SEQ ID NO: 645 - DNA, 20 bp, Artificial Sequence
  Description of Artificial Sequence: Synthetic oligonucleotide
caaagagcaagagattctga

SEQ ID NO: 646 - DNA, 20 bp, Artificial Sequence
  Description of Artificial Sequence: Synthetic oligonucleotide
aaagagcaagagattctgaa

SEQ ID NO: 647 - DNA, 20 bp, Artificial Sequence
  Description of Artificial Sequence: Synthetic oligonucleotide
acacagcactatctgaaacc

SEQ ID NO: 648 - DNA, 20 bp, Artificial Sequence
  Description of Artificial Sequence: Synthetic oligonucleotide
cacccagaaaacaacacagc

SEQ ID NO: 649 - DNA, 20 bp, Artificial Sequence
  Description of Artificial Sequence: Synthetic oligonucleotide
taccaagttgaaatgaatca

SEQ ID NO: 650 - DNA, 20 bp, Artificial Sequence
  Description of Artificial Sequence: Synthetic oligonucleotide
atgaatcaagggcagtccca

SEQ ID NO: 651 - DNA, 20 bp, Artificial Sequence
  Description of Artificial Sequence: Synthetic oligonucleotide
agggcagtcccaaggtacag

SEQ ID NO: 652 - DNA, 20 bp, Artificial Sequence
  Description of Artificial Sequence: Synthetic oligonucleotide
gttccaaaaaccctcacacc

SEQ ID NO: 653 - DNA, 20 bp, Artificial Sequence
  Description of Artificial Sequence: Synthetic oligonucleotide
gaaacagcacttgaatcaac

SEQ ID NO: 654 - DNA, 20 bp, Artificial Sequence
  Description of Artificial Sequence: Synthetic oligonucleotide
attacaaataaagaataaag

SEQ ID NO: 655 - DNA, 20 bp, Artificial Sequence
  Description of Artificial Sequence: Synthetic oligonucleotide
taatgtccaaatgggactgg

SEQ ID NO: 656 - DNA, 20 bp, Artificial Sequence
  Description of Artificial Sequence: Synthetic oligonucleotide
caaagcaagatcttcttcac

SEQ ID NO: 657 - DNA, 20 bp, Artificial Sequence
  Description of Artificial Sequence: Synthetic oligonucleotide
acaacaagcttcagttctac

SEQ ID NO: 658 - DNA, 20 bp, Artificial Sequence
  Description of Artificial Sequence: Synthetic oligonucleotide
ctgcgcaacttgctcagcaa

SEQ ID NO: 659 - DNA, 20 bp, Artificial Sequence
  Description of Artificial Sequence: Synthetic oligonucleotide
cactcagacccctccccaga

SEQ ID NO: 660 - DNA, 20 bp, Artificial Sequence
  Description of Artificial Sequence: Synthetic oligonucleotide
tttttccatgttttgttttc

SEQ ID NO: 661 - DNA, 20 bp, Artificial Sequence
  Description of Artificial Sequence: Synthetic oligonucleotide
ttacctacacatctgcaaga

SEQ ID NO: 662 - DNA, 20 bp, Artificial Sequence
  Description of Artificial Sequence: Synthetic oligonucleotide
acacttacccacttagcaat

SEQ ID NO: 663 - DNA, 20 bp, Artificial Sequence
  Description of Artificial Sequence: Synthetic oligonucleotide
catgcagaatggcagcacat

SEQ ID NO: 664 - DNA, 20 bp, Artificial Sequence
  Description of Artificial Sequence: Synthetic oligonucleotide
aagctcaggaggagaaaaaa

SEQ ID NO: 665 - DNA, 20 bp, Artificial Sequence
  Description of Artificial Sequence: Synthetic oligonucleotide
cgcaagccaggctaaacagt

SEQ ID NO: 666 - DNA, 20 bp, Artificial Sequence
  Description of Artificial Sequence: Synthetic oligonucleotide
ttctccccagtctcagccga

SEQ ID NO: 667 - DNA, 20 bp, Artificial Sequence
  Description of Artificial Sequence: Synthetic oligonucleotide
tggtcaggaaaagcagccat

SEQ ID NO: 668 - DNA, 20 bp, Artificial Sequence
  Description of Artificial Sequence: Synthetic oligonucleotide
ctagtccagggtgtggcttc

SEQ ID NO: 669 - DNA, 20 bp, Artificial Sequence
  Description of Artificial Sequence: Synthetic oligonucleotide
ccccaaaatcaacatggcag

SEQ ID NO: 670 - DNA, 20 bp, Artificial Sequence
  Description of Artificial Sequence: Synthetic oligonucleotide
tgtgatccagcagccttctt

SEQ ID NO: 671 - DNA, 20 bp, Artificial Sequence
  Description of Artificial Sequence: Synthetic oligonucleotide
gaccagatcaaggccataag

SEQ ID NO: 672 - DNA, 20 bp, Artificial Sequence
  Description of Artificial Sequence: Synthetic oligonucleotide
caagacaagaaaagcatgaa

SEQ ID NO: 673 - DNA, 20 bp, Artificial Sequence
  Description of Artificial Sequence: Synthetic oligonucleotide
ctgaacagggactgttagga

SEQ ID NO: 674 - DNA, 20 bp, Artificial Sequence
  Description of Artificial Sequence: Synthetic oligonucleotide
ccagagctcagagtggcaac

SEQ ID NO: 675 - DNA, 20 bp, Artificial Sequence
  Description of Artificial Sequence: Synthetic oligonucleotide
ttgctgcagacgccccgtga

SEQ ID NO: 676 - DNA, 20 bp, Artificial Sequence
  Description of Artificial Sequence: Synthetic oligonucleotide
ctgcagacgccccgtgacgg

SEQ ID NO: 677 - DNA, 20 bp, Artificial Sequence
  Description of Artificial Sequence: Synthetic oligonucleotide
cgacaagcagtgcctttgct

SEQ ID NO: 678 - DNA, 20 bp, Artificial Sequence
  Description of Artificial Sequence: Synthetic oligonucleotide
gcccagaacgtgattgacta

SEQ ID NO: 679 - DNA, 20 bp, Artificial Sequence
  Description of Artificial Sequence: Synthetic oligonucleotide
tgtgccaggggtgttatgac

SEQ ID NO: 680 - DNA, 20 bp, Artificial Sequence
  Description of Artificial Sequence: Synthetic oligonucleotide
cagatccagtctgatggcag

SEQ ID NO: 681 - DNA, 20 bp, Artificial Sequence
  Description of Artificial Sequence: Synthetic oligonucleotide
tgtacacgatggtcagccat

SEQ ID NO: 682 - DNA, 20 bp, Artificial Sequence
  Description of Artificial Sequence: Synthetic oligonucleotide
ttttaccttggggctctgac

SEQ ID NO: 683 - DNA, 20 bp, Artificial Sequence
  Description of Artificial Sequence: Synthetic oligonucleotide
agccccaaggtaaaaaggcc

SEQ ID NO: 684 - DNA, 20 bp, Artificial Sequence
  Description of Artificial Sequence: Synthetic oligonucleotide
gagccccaaggtaaaaaggc

SEQ ID NO: 685 - DNA, 20 bp, Artificial Sequence
  Description of Artificial Sequence: Synthetic oligonucleotide
cagctcacagtgtgccacca

SEQ ID NO: 686 - DNA, 20 bp, Artificial Sequence
  Description of Artificial Sequence: Synthetic oligonucleotide
tatgaccagatggacctggc

SEQ ID NO: 687 - DNA, 20 bp, Artificial Sequence
  Description of Artificial Sequence: Synthetic oligonucleotide
actggaccagtatgtcttcc

SEQ ID NO: 688 - DNA, 20 bp, Artificial Sequence
  Description of Artificial Sequence: Synthetic oligonucleotide
tgtcttccaggactcccagc

SEQ ID NO: 689 - DNA, 20 bp, Artificial Sequence
  Description of Artificial Sequence: Synthetic oligonucleotide
ttcaaccaggagccagcctc

SEQ ID NO: 690 - DNA, 20 bp, Artificial Sequence
  Description of Artificial Sequence: Synthetic oligonucleotide
gaccagattcccagtatgtt

SEQ ID NO: 691 - DNA, 20 bp, Artificial Sequence
  Description of Artificial Sequence: Synthetic oligonucleotide
taacatactgggaatctggt

SEQ ID NO: 692 - DNA, 20 bp, Artificial Sequence
  Description of Artificial Sequence: Synthetic oligonucleotide
aaaggcactgcaagagacaa

SEQ ID NO: 693 - DNA, 20 bp, Artificial Sequence
  Description of Artificial Sequence: Synthetic oligonucleotide
ctctggcaaatctctgaggc

SEQ ID NO: 694 - DNA, 20 bp, Artificial Sequence
  Description of Artificial Sequence: Synthetic oligonucleotide
agccaagtaccccctcccag

SEQ ID NO: 695 - DNA, 20 bp, Artificial Sequence
  Description of Artificial Sequence: Synthetic oligonucleotide
acctcccgagcaaacatgac

SEQ ID NO: 696 - DNA, 20 bp, Artificial Sequence
  Description of Artificial Sequence: Synthetic oligonucleotide
ccttacctgtcatgtttgct

SEQ ID NO: 697 - DNA, 20 bp, Artificial Sequence
  Description of Artificial Sequence: Synthetic oligonucleotide
tgctctggagatggagaagc

SEQ ID NO: 698 - DNA, 20 bp, Artificial Sequence
  Description of Artificial Sequence: Synthetic oligonucleotide
cccacccaatgcccggcagc

SEQ ID NO: 699 - DNA, 20 bp, Artificial Sequence
  Description of Artificial Sequence: Synthetic oligonucleotide
aggccattttggaagcttgt

SEQ ID NO: 700 - DNA, 20 bp, Artificial Sequence
  Description of Artificial Sequence: Synthetic oligonucleotide
accggctctgcaaaggccag

SEQ ID NO: 701 - DNA, 20 bp, Artificial Sequence
  Description of Artificial Sequence: Synthetic oligonucleotide
tggtgcaggccaggctggag

SEQ ID NO: 702 - DNA, 20 bp, Artificial Sequence
  Description of Artificial Sequence: Synthetic oligonucleotide
gaacggcagctggcccaagg

SEQ ID NO: 703 - DNA, 20 bp, Artificial Sequence
  Description of Artificial Sequence: Synthetic oligonucleotide
ggcccaaggaggcctggctg

SEQ ID NO: 704 - DNA, 20 bp, Artificial Sequence
  Description of Artificial Sequence: Synthetic oligonucleotide
gacacgagtgattgctgtgc

SEQ ID NO: 705 - DNA, 20 bp, Artificial Sequence
  Description of Artificial Sequence: Synthetic oligonucleotide
ctggtcagggcaagagctat

SEQ ID NO: 706 - DNA, 20 bp, Artificial Sequence
  Description of Artificial Sequence: Synthetic oligonucleotide
gggcccacagccactcgtgg

SEQ ID NO: 707 - DNA, 20 bp, Artificial Sequence
  Description of Artificial Sequence: Synthetic oligonucleotide
ttccagaagaagctgctccg

SEQ ID NO: 708 - DNA, 20 bp, Artificial Sequence
  Description of Artificial Sequence: Synthetic oligonucleotide
cctggtccagagcctgagca

SEQ ID NO: 709 - DNA, 20 bp, Artificial Sequence
  Description of Artificial Sequence: Synthetic oligonucleotide
cagacatcaaagtaccctac

SEQ ID NO: 710 - DNA, 20 bp, Artificial Sequence
  Description of Artificial Sequence: Synthetic oligonucleotide
acatcaaagtaccctacagg

SEQ ID NO: 711 - DNA, 20 bp, Artificial Sequence
  Description of Artificial Sequence: Synthetic oligonucleotide
cgcccaggtcctcacgtctg

SEQ ID NO: 712 - DNA, 20 bp, Artificial Sequence
  Description of Artificial Sequence: Synthetic oligonucleotide
cttagtccaacacccaccgc

SEQ ID NO: 713 - DNA, 20 bp, Artificial Sequence
  Description of Artificial Sequence: Synthetic oligonucleotide
cctcctgcaatgcttcctgg

SEQ ID NO: 714 - DNA, 20 bp, Artificial Sequence
  Description of Artificial Sequence: Synthetic oligonucleotide
gagccagccacagggccccc

SEQ ID NO: 715 - DNA, 20 bp, Artificial Sequence
  Description of Artificial Sequence: Synthetic oligonucleotide
ggaagcagaaggtgcttgcg

SEQ ID NO: 716 - DNA, 20 bp, Artificial Sequence
  Description of Artificial Sequence: Synthetic oligonucleotide
ggctgcagccggggacactg

SEQ ID NO: 717 - DNA, 20 bp, Artificial Sequence
  Description of Artificial Sequence: Synthetic oligonucleotide
ctgccaaattccagcctcct

SEQ ID NO: 718 - DNA, 20 bp, Artificial Sequence
  Description of Artificial Sequence: Synthetic oligonucleotide
ggcgggccaagacttctccc

SEQ ID NO: 719 - DNA, 20 bp, Artificial Sequence
  Description of Artificial Sequence: Synthetic oligonucleotide
agactcagaggtgagaggag

SEQ ID NO: 720 - DNA, 20 bp, Artificial Sequence
  Description of Artificial Sequence: Synthetic oligonucleotide
agcctaggaggcaaagagca

SEQ ID NO: 721 - DNA, 20 bp, Artificial Sequence
  Description of Artificial Sequence: Synthetic oligonucleotide
cccccaggctttccccaaac

SEQ ID NO: 722 - DNA, 20 bp, Artificial Sequence
  Description of Artificial Sequence: Synthetic oligonucleotide
tcactccagatgctgcaggg

SEQ ID NO: 723 - DNA, 20 bp, Artificial Sequence
  Description of Artificial Sequence: Synthetic oligonucleotide
aggctgcaggtggaatcaga

SEQ ID NO: 724 - DNA, 20 bp, Artificial Sequence
  Description of Artificial Sequence: Synthetic oligonucleotide
cttcccccagctgaagtcct

SEQ ID NO: 725 - DNA, 20 bp, Artificial Sequence
  Description of Artificial Sequence: Synthetic oligonucleotide
cactcacttgagggtttcca

SEQ ID NO: 726 - DNA, 20 bp, Artificial Sequence
  Description of Artificial Sequence: Synthetic oligonucleotide
cagactgcggggacacagtg

SEQ ID NO: 727 - DNA, 20 bp, Artificial Sequence
  Description of Artificial Sequence: Synthetic oligonucleotide
ccactcaccttagcctgagc

SEQ ID NO: 728 - DNA, 20 bp, Artificial Sequence
  Description of Artificial Sequence: Synthetic oligonucleotide
cactcaccttagcctgagca

SEQ ID NO: 729 - DNA, 20 bp, Artificial Sequence
  Description of Artificial Sequence: Synthetic oligonucleotide
gtacaagctgtcggaaacag

SEQ ID NO: 730 - DNA, 20 bp, Artificial Sequence
  Description of Artificial Sequence: Synthetic oligonucleotide
acactcactccatcacccgg

SEQ ID NO: 731 - DNA, 20 bp, Artificial Sequence
  Description of Artificial Sequence: Synthetic oligonucleotide
cactcactccatcacccgga

SEQ ID NO: 732 - DNA, 20 bp, Artificial Sequence
  Description of Artificial Sequence: Synthetic oligonucleotide
cgtccagtacaacaagttca

SEQ ID NO: 733 - DNA, 20 bp, Artificial Sequence
  Description of Artificial Sequence: Synthetic oligonucleotide
ccacatcctgcaagggggga

SEQ ID NO: 734 - DNA, 20 bp, Artificial Sequence
  Description of Artificial Sequence: Synthetic oligonucleotide
cacatcctgcaaggggggat

SEQ ID NO: 735 - DNA, 20 bp, Artificial Sequence
  Description of Artificial Sequence: Synthetic oligonucleotide
tgggcgtccacatcctgcaa

SEQ ID NO: 736 - DNA, 20 bp, Artificial Sequence
  Description of Artificial Sequence: Synthetic oligonucleotide
gggcgtccacatcctgcaag

SEQ ID NO: 737 - DNA, 20 bp, Artificial Sequence
  Description of Artificial Sequence: Synthetic oligonucleotide
ggcgtccacatcctgcaagg

SEQ ID NO: 738 - DNA, 20 bp, Artificial Sequence
  Description of Artificial Sequence: Synthetic oligonucleotide
gcgtccacatcctgcaaggg

SEQ ID NO: 739 - DNA, 20 bp, Artificial Sequence
  Description of Artificial Sequence: Synthetic oligonucleotide
gcccaaggtaagagcttccc

SEQ ID NO: 740 - DNA, 20 bp, Artificial Sequence
  Description of Artificial Sequence: Synthetic oligonucleotide
gctcttaccttgggcagcca

SEQ ID NO: 741 - DNA, 20 bp, Artificial Sequence
  Description of Artificial Sequence: Synthetic oligonucleotide
agctcttaccttgggcagcc

SEQ ID NO: 742 - DNA, 20 bp, Artificial Sequence
  Description of Artificial Sequence: Synthetic oligonucleotide
tgcacctctggggaggacct

SEQ ID NO: 743 - DNA, 20 bp, Artificial Sequence
  Description of Artificial Sequence: Synthetic oligonucleotide
ctgcacctctggggaggacc

SEQ ID NO: 744 - DNA, 20 bp, Artificial Sequence
  Description of Artificial Sequence: Synthetic oligonucleotide
cgcctgcagctgtcggacac

SEQ ID NO: 745 - DNA, 20 bp, Artificial Sequence
  Description of Artificial Sequence: Synthetic oligonucleotide
cacctgccaggccatcacgg

SEQ ID NO: 746 - DNA, 20 bp, Artificial Sequence
  Description of Artificial Sequence: Synthetic oligonucleotide
ccctacctgtcaccaggacc

SEQ ID NO: 747 - DNA, 20 bp, Artificial Sequence
  Description of Artificial Sequence: Synthetic oligonucleotide
cctacctgtcaccaggacca

SEQ ID NO: 748 - DNA, 20 bp, Artificial Sequence
  Description of Artificial Sequence: Synthetic oligonucleotide
cctctgagaaggaaaaaaga

SEQ ID NO: 749 - DNA, 20 bp, Artificial Sequence
  Description of Artificial Sequence: Synthetic oligonucleotide
cagaggaacagtcccaagga

SEQ ID NO: 750 - DNA, 20 bp, Artificial Sequence
  Description of Artificial Sequence: Synthetic oligonucleotide
cactcacctgcccacagcag

SEQ ID NO: 751 - DNA, 20 bp, Artificial Sequence
  Description of Artificial Sequence: Synthetic oligonucleotide
ccactcacctgcccacagca

SEQ ID NO: 752 - DNA, 20 bp, Artificial Sequence
  Description of Artificial Sequence: Synthetic oligonucleotide
gccactcacctgcccacagc

SEQ ID NO: 753 - DNA, 20 bp, Artificial Sequence
  Description of Artificial Sequence: Synthetic oligonucleotide
agggcccctgtggggaaacg

SEQ ID NO: 754 - DNA, 20 bp, Artificial Sequence
  Description of Artificial Sequence: Synthetic oligonucleotide
gggcccctgtggggaaacga

SEQ ID NO: 755 - DNA, 20 bp, Artificial Sequence
  Description of Artificial Sequence: Synthetic oligonucleotide
gcaagtgcaggagtcagtga

SEQ ID NO: 756 - DNA, 20 bp, Artificial Sequence
  Description of Artificial Sequence: Synthetic oligonucleotide
cggaaccagtaaccatgaac

SEQ ID NO: 757 - DNA, 20 bp, Artificial Sequence
  Description of Artificial Sequence: Synthetic oligonucleotide
ggaaccagtaaccatgaact

SEQ ID NO: 758 - DNA, 20 bp, Artificial Sequence
  Description of Artificial Sequence: Synthetic oligonucleotide
gaaccagtaaccatgaactg

SEQ ID NO: 759 - DNA, 20 bp, Artificial Sequence
  Description of Artificial Sequence: Synthetic oligonucleotide
gctagatcaagaagtacagg

SEQ ID NO: 760 - DNA, 20 bp, Artificial Sequence
  Description of Artificial Sequence: Synthetic oligonucleotide
agaagtacaggaggagactc

SEQ ID NO: 761 - DNA, 20 bp, Artificial Sequence
  Description of Artificial Sequence: Synthetic oligonucleotide
caagtctagtgaggagaaag

SEQ ID NO: 762 - DNA, 20 bp, Artificial Sequence
  Description of Artificial Sequence: Synthetic oligonucleotide
aagtctagtgaggagaaaga

SEQ ID NO: 763 - DNA, 20 bp, Artificial Sequence
  Description of Artificial Sequence: Synthetic oligonucleotide
agtctagtgaggagaaagag

SEQ ID NO: 764 - DNA, 20 bp, Artificial Sequence
  Description of Artificial Sequence: Synthetic oligonucleotide
acaggcccaggacacagagc

SEQ ID NO: 765 - DNA, 20 bp, Artificial Sequence
  Description of Artificial Sequence: Synthetic oligonucleotide
acctgtcaggtgaagttcgc

SEQ ID NO: 766 - DNA, 20 bp, Artificial Sequence
  Description of Artificial Sequence: Synthetic oligonucleotide
acttacaggtgacgttgagc

SEQ ID NO: 767 - DNA, 20 bp, Artificial Sequence
  Description of Artificial Sequence: Synthetic oligonucleotide
aacatctaggagaggaagag

SEQ ID NO: 768 - DNA, 20 bp, Artificial Sequence
  Description of Artificial Sequence: Synthetic oligonucleotide
gttccacagaacccaacaac

SEQ ID NO: 769 - DNA, 20 bp, Artificial Sequence
  Description of Artificial Sequence: Synthetic oligonucleotide
ttcctacctgagccatctcc

SEQ ID NO: 770 - DNA, 20 bp, Artificial Sequence
  Description of Artificial Sequence: Synthetic oligonucleotide
atgctcacatgaagaagatg

SEQ ID NO: 771 - DNA, 20 bp, Artificial Sequence
  Description of Artificial Sequence: Synthetic oligonucleotide
gggaaacaagagaccagagc

SEQ ID NO: 772 - DNA, 20 bp, Artificial Sequence
  Description of Artificial Sequence: Synthetic oligonucleotide
tcactctgatgggagacacc

SEQ ID NO: 773 - DNA, 20 bp, Artificial Sequence
  Description of Artificial Sequence: Synthetic oligonucleotide
cactctgatgggagacacca

SEQ ID NO: 774 - DNA, 20 bp, Artificial Sequence
  Description of Artificial Sequence: Synthetic oligonucleotide
tttcttatggagaggaaaga

SEQ ID NO: 775 - DNA, 20 bp, Artificial Sequence
  Description of Artificial Sequence: Synthetic oligonucleotide
gtacaggtaagagcaacgcc

SEQ ID NO: 776 - DNA, 20 bp, Artificial Sequence
  Description of Artificial Sequence: Synthetic oligonucleotide
ctcttacctgtaccataacc

SEQ ID NO: 777 - DNA, 20 bp, Artificial Sequence
  Description of Artificial Sequence: Synthetic oligonucleotide
ttacctgtaccataaccagg

SEQ ID NO: 778 - DNA, 20 bp, Artificial Sequence
  Description of Artificial Sequence: Synthetic oligonucleotide
tgtatctgtaggaggagaag

SEQ ID NO: 779 - DNA, 20 bp, Artificial Sequence
  Description of Artificial Sequence: Synthetic oligonucleotide
gtatctgtaggaggagaagt

SEQ ID NO: 780 - DNA, 20 bp, Artificial Sequence
  Description of Artificial Sequence: Synthetic oligonucleotide
cagatacaaactggactctc

SEQ ID NO: 781 - DNA, 20 bp, Artificial Sequence
  Description of Artificial Sequence: Synthetic oligonucleotide
tcttaccttccttcgtttgc

SEQ ID NO: 782 - DNA, 20 bp, Artificial Sequence
  Description of Artificial Sequence: Synthetic oligonucleotide
tttggatctaaaacggtgac

SEQ ID NO: 783 - DNA, 20 bp, Artificial Sequence
  Description of Artificial Sequence: Synthetic oligonucleotide
gatctaaaacggtgacaggt

SEQ ID NO: 784 - DNA, 20 bp, Artificial Sequence
  Description of Artificial Sequence: Synthetic oligonucleotide
aaaggctcagcagttgacct

SEQ ID NO: 785 - DNA, 20 bp, Artificial Sequence
  Description of Artificial Sequence: Synthetic oligonucleotide
atttaccggcatagaatagt

SEQ ID NO: 786 - DNA, 20 bp, Artificial Sequence
  Description of Artificial Sequence: Synthetic oligonucleotide
tcactgcctaagagagacat

SEQ ID NO: 787 - DNA, 20 bp, Artificial Sequence
  Description of Artificial Sequence: Synthetic oligonucleotide
aggatccacgtggagaatgg

SEQ ID NO: 788 - DNA, 20 bp, Artificial Sequence
  Description of Artificial Sequence: Synthetic oligonucleotide
ggatccacgtggagaatggt

SEQ ID NO: 789 - DNA, 20 bp, Artificial Sequence
  Description of Artificial Sequence: Synthetic oligonucleotide
tctcactgttctcagggaag

SEQ ID NO: 790 - DNA, 20 bp, Artificial Sequence
  Description of Artificial Sequence: Synthetic oligonucleotide
cctgcccaaggcttcccacc

SEQ ID NO: 791 - DNA, 20 bp, Artificial Sequence
  Description of Artificial Sequence: Synthetic oligonucleotide
ctgcccaaggcttcccacct

SEQ ID NO: 792 - DNA, 20 bp, Artificial Sequence
  Description of Artificial Sequence: Synthetic oligonucleotide
gcctgctgcggtaagcggta

SEQ ID NO: 793 - DNA, 20 bp, Artificial Sequence
  Description of Artificial Sequence: Synthetic oligonucleotide
gatgctcagggaacacgtat

SEQ ID NO: 794 - DNA, 20 bp, Artificial Sequence
  Description of Artificial Sequence: Synthetic oligonucleotide
ttctcaaagttcccacatcc

SEQ ID NO: 795 - DNA, 20 bp, Artificial Sequence
  Description of Artificial Sequence: Synthetic oligonucleotide
tcacagattggtgagtagcc

SEQ ID NO: 796 - DNA, 20 bp, Artificial Sequence
  Description of Artificial Sequence: Synthetic oligonucleotide
ctcacctgttctgtgattac

SEQ ID NO: 797 - DNA, 20 bp, Artificial Sequence
  Description of Artificial Sequence: Synthetic oligonucleotide
tccttccagctactcaatcc

SEQ ID NO: 798 - DNA, 20 bp, Artificial Sequence
  Description of Artificial Sequence: Synthetic oligonucleotide
cacagtacaaataagagccc

SEQ ID NO: 799 - DNA, 20 bp, Artificial Sequence
  Description of Artificial Sequence: Synthetic oligonucleotide
ccccccagcgcttcggtgag

SEQ ID NO: 800 - DNA, 20 bp, Artificial Sequence
  Description of Artificial Sequence: Synthetic oligonucleotide
cccccagcgcttcggtgagt

SEQ ID NO: 801 - DNA, 20 bp, Artificial Sequence
  Description of Artificial Sequence: Synthetic oligonucleotide
ccactcaccgaagcgctggg

SEQ ID NO: 802 - DNA, 20 bp, Artificial Sequence
  Description of Artificial Sequence: Synthetic oligonucleotide
tacctcggaggaaagagaaa

SEQ ID NO: 803 - DNA, 20 bp, Artificial Sequence
  Description of Artificial Sequence: Synthetic oligonucleotide
cagcttccaaaacgacaagc

SEQ ID NO: 804 - DNA, 20 bp, Artificial Sequence
  Description of Artificial Sequence: Synthetic oligonucleotide
aacataccagcttgtcgttt

SEQ ID NO: 805 - DNA, 20 bp, Artificial Sequence
  Description of Artificial Sequence: Synthetic oligonucleotide
agaccacctgcagagacgag

SEQ ID NO: 806 - DNA, 20 bp, Artificial Sequence
  Description of Artificial Sequence: Synthetic oligonucleotide
ccacctgcagagacgagagg

SEQ ID NO: 807 - DNA, 20 bp, Artificial Sequence
  Description of Artificial Sequence: Synthetic oligonucleotide
ccacacccaaaaggccacac

SEQ ID NO: 808 - DNA, 20 bp, Artificial Sequence
  Description of Artificial Sequence: Synthetic oligonucleotide
cccaccagctcagctccacg

SEQ ID NO: 809 - DNA, 20 bp, Artificial Sequence
  Description of Artificial Sequence: Synthetic oligonucleotide
cgctgtcaagtccagttcta

SEQ ID NO: 810 - DNA, 20 bp, Artificial Sequence
  Description of Artificial Sequence: Synthetic oligonucleotide
gctgtcaagtccagttctac

SEQ ID NO: 811 - DNA, 20 bp, Artificial Sequence
  Description of Artificial Sequence: Synthetic oligonucleotide
cacccagatcgtcagcgccg

SEQ ID NO: 812 - DNA, 20 bp, Artificial Sequence
  Description of Artificial Sequence: Synthetic oligonucleotide
ccactcacctgctctacccc

SEQ ID NO: 813 - DNA, 20 bp, Artificial Sequence
  Description of Artificial Sequence: Synthetic oligonucleotide
ccacagtctgaaagaaagca

SEQ ID NO: 814 - DNA, 20 bp, Artificial Sequence
  Description of Artificial Sequence: Synthetic oligonucleotide
gacactgttggcacggagga

SEQ ID NO: 815 - DNA, 20 bp, Artificial Sequence
  Description of Artificial Sequence: Synthetic oligonucleotide
ttaccatggccatcaacaca

SEQ ID NO: 816 - DNA, 20 bp, Artificial Sequence
  Description of Artificial Sequence: Synthetic oligonucleotide
ccacacccaaaaggccacac

SEQ ID NO: 817 - DNA, 20 bp, Artificial Sequence
  Description of Artificial Sequence: Synthetic oligonucleotide
cccaccagctcagctccacg

SEQ ID NO: 818 - DNA, 20 bp, Artificial Sequence
  Description of Artificial Sequence: Synthetic oligonucleotide
cgctgtcaagtccagttcta

SEQ ID NO: 819 - DNA, 20 bp, Artificial Sequence
  Description of Artificial Sequence: Synthetic oligonucleotide
gctgtcaagtccagttctac

SEQ ID NO: 820 - DNA, 20 bp, Artificial Sequence
  Description of Artificial Sequence: Synthetic oligonucleotide
cacccagatcgtcagcgccg

SEQ ID NO: 821 - DNA, 20 bp, Artificial Sequence
  Description of Artificial Sequence: Synthetic oligonucleotide
ccacagtctgaaagaaaaca

SEQ ID NO: 822 - DNA, 20 bp, Artificial Sequence
  Description of Artificial Sequence: Synthetic oligonucleotide
cacagtctgaaagaaaacag

SEQ ID NO: 823 - DNA, 20 bp, Artificial Sequence
  Description of Artificial Sequence: Synthetic oligonucleotide
ttaccatggccatcagcacg

SEQ ID NO: 824 - DNA, 20 bp, Artificial Sequence
  Description of Artificial Sequence: Synthetic oligonucleotide
ccactcacctgctctacccc

SEQ ID NO: 825 - DNA, 20 bp, Artificial Sequence
  Description of Artificial Sequence: Synthetic oligonucleotide
tctgcgttcaggggtaagcg

SEQ ID NO: 826 - DNA, 20 bp, Artificial Sequence
  Description of Artificial Sequence: Synthetic oligonucleotide
gcgcttacccctgaacgcag

SEQ ID NO: 827 - DNA, 20 bp, Artificial Sequence
  Description of Artificial Sequence: Synthetic oligonucleotide
gactgggcagcggcccctgt

SEQ ID NO: 828 - DNA, 20 bp, Artificial Sequence
  Description of Artificial Sequence: Synthetic oligonucleotide
ggactgggcagcggcccctg

SEQ ID NO: 829 - DNA, 20 bp, Artificial Sequence
  Description of Artificial Sequence: Synthetic oligonucleotide
gtcatgcagcccttgcctgc

SEQ ID NO: 830 - DNA, 20 bp, Artificial Sequence
  Description of Artificial Sequence: Synthetic oligonucleotide
tcatgcagcccttgcctgct

SEQ ID NO: 831 - DNA, 20 bp, Artificial Sequence
  Description of Artificial Sequence: Synthetic oligonucleotide
catgcagcccttgcctgctg

SEQ ID NO: 832 - DNA, 20 bp, Artificial Sequence
  Description of Artificial Sequence: Synthetic oligonucleotide
ctcaccagattcccgaaggt

SEQ ID NO: 833 - DNA, 20 bp, Artificial Sequence
  Description of Artificial Sequence: Synthetic oligonucleotide
cagactcaccagattcccga

SEQ ID NO: 834 - DNA, 20 bp, Artificial Sequence
  Description of Artificial Sequence: Synthetic oligonucleotide
agcctaggcaagtgcagagg

SEQ ID NO: 835 - DNA, 20 bp, Artificial Sequence
  Description of Artificial Sequence: Synthetic oligonucleotide
cagcctaggcaagtgcagag

SEQ ID NO: 836 - DNA, 20 bp, Artificial Sequence
  Description of Artificial Sequence: Synthetic oligonucleotide
accagcctaggcaagtgcag

SEQ ID NO: 837 - DNA, 20 bp, Artificial Sequence
  Description of Artificial Sequence: Synthetic oligonucleotide
tggaaccccaataccagcct

SEQ ID NO: 838 - DNA, 20 bp, Artificial Sequence
  Description of Artificial Sequence: Synthetic oligonucleotide
cacctgcagaagatgccaga

SEQ ID NO: 839 - DNA, 20 bp, Artificial Sequence
  Description of Artificial Sequence: Synthetic oligonucleotide
cgctcacctgcaccagcctc

SEQ ID NO: 840 - DNA, 20 bp, Artificial Sequence
  Description of Artificial Sequence: Synthetic oligonucleotide
cttcctggcaagacacaaga

SEQ ID NO: 841 - DNA, 20 bp, Artificial Sequence
  Description of Artificial Sequence: Synthetic oligonucleotide
aattcagggagccattgaaa

SEQ ID NO: 842 - DNA, 20 bp, Artificial Sequence
  Description of Artificial Sequence: Synthetic oligonucleotide
ctactgacctgccttttcaa

SEQ ID NO: 843 - DNA, 20 bp, Artificial Sequence
  Description of Artificial Sequence: Synthetic oligonucleotide
gcctctcaaagtcttatgtg

SEQ ID NO: 844 - DNA, 20 bp, Artificial Sequence
  Description of Artificial Sequence: Synthetic oligonucleotide
ttcccatgctgctttacttc

SEQ ID NO: 845 - DNA, 20 bp, Artificial Sequence
  Description of Artificial Sequence: Synthetic oligonucleotide
tttaggtcaaccagatgtag

SEQ ID NO: 846 - DNA, 20 bp, Artificial Sequence
  Description of Artificial Sequence: Synthetic oligonucleotide
tgtgcctgaaagcaaaaatg

SEQ ID NO: 847 - DNA, 20 bp, Artificial Sequence
  Description of Artificial Sequence: Synthetic oligonucleotide
ttacctactattcttgccag

SEQ ID NO: 848 - DNA, 20 bp, Artificial Sequence
  Description of Artificial Sequence: Synthetic oligonucleotide
aaatgctgtttaaaaaaagg

SEQ ID NO: 849 - DNA, 20 bp, Artificial Sequence
  Description of Artificial Sequence: Synthetic oligonucleotide
ccccaaaaagtgaatatcaa

SEQ ID NO: 850 - DNA, 20 bp, Artificial Sequence
  Description of Artificial Sequence: Synthetic oligonucleotide
gtccagaatttccagaagta

SEQ ID NO: 851 - DNA, 20 bp, Artificial Sequence
  Description of Artificial Sequence: Synthetic oligonucleotide
tccctggaggggtgggggag

SEQ ID NO: 852 - DNA, 20 bp, Artificial Sequence
  Description of Artificial Sequence: Synthetic oligonucleotide
tcacttcaacaggactccta

SEQ ID NO: 853 - DNA, 20 bp, Artificial Sequence
  Description of Artificial Sequence: Synthetic oligonucleotide
ccttacactcaaaggcaaag

SEQ ID NO: 854 - DNA, 20 bp, Artificial Sequence
  Description of Artificial Sequence: Synthetic oligonucleotide
atggctgcagggagaggaag

SEQ ID NO: 855 - DNA, 20 bp, Artificial Sequence
  Description of Artificial Sequence: Synthetic oligonucleotide
ggagcgccaggggatgctgg

SEQ ID NO: 856 - DNA, 20 bp, Artificial Sequence
  Description of Artificial Sequence: Synthetic oligonucleotide
tcacgtcccatgcagccaca

SEQ ID NO: 857 - DNA, 20 bp, Artificial Sequence
  Description of Artificial Sequence: Synthetic oligonucleotide
tggacgtctggtggggagta

SEQ ID NO: 858 - DNA, 20 bp, Artificial Sequence
  Description of Artificial Sequence: Synthetic oligonucleotide
actcacattgatgaggaaga

SEQ ID NO: 859 - DNA, 20 bp, Artificial Sequence
  Description of Artificial Sequence: Synthetic oligonucleotide
cagcatctgagaaaggcaga

SEQ ID NO: 860 - DNA, 20 bp, Artificial Sequence
  Description of Artificial Sequence: Synthetic oligonucleotide
aatccaacacctcagcgatg

SEQ ID NO: 861 - DNA, 20 bp, Artificial Sequence
  Description of Artificial Sequence: Synthetic oligonucleotide
atccaacacctcagcgatgt

SEQ ID NO: 862 - DNA, 20 bp, Artificial Sequence
  Description of Artificial Sequence: Synthetic oligonucleotide
cgcggcgcagtacccgctgc

SEQ ID NO: 863 - DNA, 20 bp, Artificial Sequence
  Description of Artificial Sequence: Synthetic oligonucleotide
cactcaccgtggtgggtcgg

SEQ ID NO: 864 - DNA, 20 bp, Artificial Sequence
  Description of Artificial Sequence: Synthetic oligonucleotide
actcaccgtggtgggtcgga

SEQ ID NO: 865 - DNA, 20 bp, Artificial Sequence
  Description of Artificial Sequence: Synthetic oligonucleotide
tggctccctgtggggcaacg

SEQ ID NO: 866 - DNA, 20 bp, Artificial Sequence
  Description of Artificial Sequence: Synthetic oligonucleotide
gattccagggggaggcggtg

SEQ ID NO: 867 - DNA, 20 bp, Artificial Sequence
  Description of Artificial Sequence: Synthetic oligonucleotide
gctcctacctgtgctggacc

SEQ ID NO: 868 - DNA, 20 bp, Artificial Sequence
  Description of Artificial Sequence: Synthetic oligonucleotide
tcgccgccacagtggggtcg

SEQ ID NO: 869 - DNA, 20 bp, Artificial Sequence
  Description of Artificial Sequence: Synthetic oligonucleotide
cagactgagagtggggagag

SEQ ID NO: 870 - DNA, 20 bp, Artificial Sequence
  Description of Artificial Sequence: Synthetic oligonucleotide
cctcctccagagtgtggttg

SEQ ID NO: 871 - DNA, 20 bp, Artificial Sequence
  Description of Artificial Sequence: Synthetic oligonucleotide
agccatcccagggagagagc

SEQ ID NO: 872 - DNA, 20 bp, Artificial Sequence
  Description of Artificial Sequence: Synthetic oligonucleotide
gccatcccagggagagagct

SEQ ID NO: 873 - DNA, 20 bp, Artificial Sequence
  Description of Artificial Sequence: Synthetic oligonucleotide
ccatcccagggagagagctg

SEQ ID NO: 874 - DNA, 20 bp, Artificial Sequence
  Description of Artificial Sequence: Synthetic oligonucleotide
ctcacaggccacccaccagc

SEQ ID NO: 875 - DNA, 20 bp, Artificial Sequence
  Description of Artificial Sequence: Synthetic oligonucleotide
ccgcttccagaagtgcctgg

SEQ ID NO: 876 - DNA, 20 bp, Artificial Sequence
  Description of Artificial Sequence: Synthetic oligonucleotide
cttccagaagtgcctggcgg

SEQ ID NO: 877 - DNA, 20 bp, Artificial Sequence
  Description of Artificial Sequence: Synthetic oligonucleotide
acaactgcaaaggaatgggt

SEQ ID NO: 878 - DNA, 20 bp, Artificial Sequence
  Description of Artificial Sequence: Synthetic oligonucleotide
caactgcaaaggaatgggta

SEQ ID NO: 879 - DNA, 20 bp, Artificial Sequence
  Description of Artificial Sequence: Synthetic oligonucleotide
gaactaggaagacggtccag

SEQ ID NO: 880 - DNA, 20 bp, Artificial Sequence
  Description of Artificial Sequence: Synthetic oligonucleotide
ggctgaccaggacctgttgc

SEQ ID NO: 881 - DNA, 20 bp, Artificial Sequence
  Description of Artificial Sequence: Synthetic oligonucleotide
ctcacctgtacgccaggcgg

SEQ ID NO: 882 - DNA, 20 bp, Artificial Sequence
  Description of Artificial Sequence: Synthetic oligonucleotide
gctctcacctgtacgccagg

SEQ ID NO: 883 - DNA, 20 bp, Artificial Sequence
  Description of Artificial Sequence: Synthetic oligonucleotide
cttagacctggcaggcagat

SEQ ID NO: 884 - DNA, 20 bp, Artificial Sequence
  Description of Artificial Sequence: Synthetic oligonucleotide
caatccagtccccgaagcca

SEQ ID NO: 885 - DNA, 20 bp, Artificial Sequence
  Description of Artificial Sequence: Synthetic oligonucleotide
aatccagtccccgaagccac

SEQ ID NO: 886 - DNA, 20 bp, Artificial Sequence
  Description of Artificial Sequence: Synthetic oligonucleotide
actcaccggtgatgaggaca

SEQ ID NO: 887 - DNA, 20 bp, Artificial Sequence
  Description of Artificial Sequence: Synthetic oligonucleotide
ctcaccggtgatgaggacaa

SEQ ID NO: 888 - DNA, 20 bp, Artificial Sequence
  Description of Artificial Sequence: Synthetic oligonucleotide
ccggtctgcgggaagggtac

SEQ ID NO: 889 - DNA, 20 bp, Artificial Sequence
  Description of Artificial Sequence: Synthetic oligonucleotide
tgggctgcaggagccgcggc

SEQ ID NO: 890 - DNA, 20 bp, Artificial Sequence
  Description of Artificial Sequence: Synthetic oligonucleotide
ttgtaccaaatgcccctgtc

SEQ ID NO: 891 - DNA, 20 bp, Artificial Sequence
  Description of Artificial Sequence: Synthetic oligonucleotide
cggacagcagtcctccatta

SEQ ID NO: 892 - DNA, 20 bp, Artificial Sequence
  Description of Artificial Sequence: Synthetic oligonucleotide
aggtgcagcacagccccatg

SEQ ID NO: 893 - DNA, 20 bp, Artificial Sequence
  Description of Artificial Sequence: Synthetic oligonucleotide
ggtgcagcacagccccatgt

SEQ ID NO: 894 - DNA, 20 bp, Artificial Sequence
  Description of Artificial Sequence: Synthetic oligonucleotide
agttgccagatgcgcttcga

SEQ ID NO: 895 - DNA, 20 bp, Artificial Sequence
  Description of Artificial Sequence: Synthetic oligonucleotide
gttgccagatgcgcttcgac

SEQ ID NO: 896 - DNA, 20 bp, Artificial Sequence
  Description of Artificial Sequence: Synthetic oligonucleotide
gtctcagctgctcgacacgc

SEQ ID NO: 897 - DNA, 20 bp, Artificial Sequence
  Description of Artificial Sequence: Synthetic oligonucleotide
ttcttaccctggaatagtcc

SEQ ID NO: 898 - DNA, 20 bp, Artificial Sequence
  Description of Artificial Sequence: Synthetic oligonucleotide
attacctgtatgctaatcga

SEQ ID NO: 899 - DNA, 20 bp, Artificial Sequence
  Description of Artificial Sequence: Synthetic oligonucleotide
ttgcaatgcgttcgtggctt

SEQ ID NO: 900 - DNA, 20 bp, Artificial Sequence
  Description of Artificial Sequence: Synthetic oligonucleotide
actgacctgtgaccatagcc

SEQ ID NO: 901 - DNA, 20 bp, Artificial Sequence
  Description of Artificial Sequence: Synthetic oligonucleotide
tatctgcagggacagagaaa

SEQ ID NO: 902 - DNA, 20 bp, Artificial Sequence
  Description of Artificial Sequence: Synthetic oligonucleotide
tgcggcgcagacatacagct

SEQ ID NO: 903 - DNA, 20 bp, Artificial Sequence
  Description of Artificial Sequence: Synthetic oligonucleotide
ccccgcaggcgggggcgtta

SEQ ID NO: 904 - DNA, 20 bp, Artificial Sequence
  Description of Artificial Sequence: Synthetic oligonucleotide
tttcagaagtgtctcagtgt

SEQ ID NO: 905 - DNA, 20 bp, Artificial Sequence
  Description of Artificial Sequence: Synthetic oligonucleotide
attacctgatggaaagtctg

SEQ ID NO: 906 - DNA, 20 bp, Artificial Sequence
  Description of Artificial Sequence: Synthetic oligonucleotide
cttcagtgccttcgtggatt

SEQ ID NO: 907 - DNA, 20 bp, Artificial Sequence
  Description of Artificial Sequence: Synthetic oligonucleotide
tttctgcagagggatagaga

SEQ ID NO: 908 - DNA, 20 bp, Artificial Sequence
  Description of Artificial Sequence: Synthetic oligonucleotide
agaccaccagagtaagggac

SEQ ID NO: 909 - DNA, 20 bp, Artificial Sequence
  Description of Artificial Sequence: Synthetic oligonucleotide
acttgcagccctcggccaaa

SEQ ID NO: 910 - DNA, 20 bp, Artificial Sequence
  Description of Artificial Sequence: Synthetic oligonucleotide
agggctcaccagaggtagga

SEQ ID NO: 911 - DNA, 20 bp, Artificial Sequence
  Description of Artificial Sequence: Synthetic oligonucleotide
ttcacctgcccaaggaaaaa

SEQ ID NO: 912 - DNA, 20 bp, Artificial Sequence
  Description of Artificial Sequence: Synthetic oligonucleotide
ctaagcctagaaaatcagtt

SEQ ID NO: 913 - DNA, 20 bp, Artificial Sequence
  Description of Artificial Sequence: Synthetic oligonucleotide
acatctagaaaaaaaaatac

SEQ ID NO: 914 - DNA, 20 bp, Artificial Sequence
  Description of Artificial Sequence: Synthetic oligonucleotide
attaccttcctctttgcact

SEQ ID NO: 915 - DNA, 20 bp, Artificial Sequence
  Description of Artificial Sequence: Synthetic oligonucleotide
gatcctgtaggttggaacat

SEQ ID NO: 916 - DNA, 20 bp, Artificial Sequence
  Description of Artificial Sequence: Synthetic oligonucleotide
aagccaccccaagttagatc

SEQ ID NO: 917 - DNA, 20 bp, Artificial Sequence
  Description of Artificial Sequence: Synthetic oligonucleotide
aacttaccccaaacaattag

SEQ ID NO: 918 - DNA, 20 bp, Artificial Sequence
  Description of Artificial Sequence: Synthetic oligonucleotide
atacctacaggatttaaagt

SEQ ID NO: 919 - DNA, 20 bp, Artificial Sequence
  Description of Artificial Sequence: Synthetic oligonucleotide
gtttcctagaaagcaaaaaa

SEQ ID NO: 920 - DNA, 20 bp, Artificial Sequence
  Description of Artificial Sequence: Synthetic oligonucleotide
aagttcaactgcttcgtaat

SEQ ID NO: 921 - DNA, 20 bp, Artificial Sequence
  Description of Artificial Sequence: Synthetic oligonucleotide
aattcagactatcatcctca

SEQ ID NO: 922 - DNA, 20 bp, Artificial Sequence
  Description of Artificial Sequence: Synthetic oligonucleotide
gcttgcagctgtgggacacc

SEQ ID NO: 923 - DNA, 20 bp, Artificial Sequence
  Description of Artificial Sequence: Synthetic oligonucleotide
gaccactcaaccagtgccca

SEQ ID NO: 924 - DNA, 20 bp, Artificial Sequence
  Description of Artificial Sequence: Synthetic oligonucleotide
ggaggcacagaccactccac

SEQ ID NO: 925 - DNA, 20 bp, Artificial Sequence
  Description of Artificial Sequence: Synthetic oligonucleotide
ggcacagacaactcgactga

SEQ ID NO: 926 - DNA, 20 bp, Artificial Sequence
  Description of Artificial Sequence: Synthetic oligonucleotide
ggaggcacagaccactccac

SEQ ID NO: 927 - DNA, 20 bp, Artificial Sequence
  Description of Artificial Sequence: Synthetic oligonucleotide
gcacagaccactcaacccac

SEQ ID NO: 928 - DNA, 20 bp, Artificial Sequence
  Description of Artificial Sequence: Synthetic oligonucleotide
gaccactcaacccacaggcc

SEQ ID NO: 929 - DNA, 20 bp, Artificial Sequence
  Description of Artificial Sequence: Synthetic oligonucleotide
gaccactcaaaccacagcca

SEQ ID NO: 930 - DNA, 20 bp, Artificial Sequence
  Description of Artificial Sequence: Synthetic oligonucleotide
gaccactcaacccacagcca

SEQ ID NO: 931 - DNA, 20 bp, Artificial Sequence
  Description of Artificial Sequence: Synthetic oligonucleotide
ggaggcacagaccactccac

SEQ ID NO: 932 - DNA, 20 bp, Artificial Sequence
  Description of Artificial Sequence: Synthetic oligonucleotide
gaccactcaaccagcagcca

SEQ ID NO: 933 - DNA, 20 bp, Artificial Sequence
  Description of Artificial Sequence: Synthetic oligonucleotide
ttcgtatctgtaaaaccaag

SEQ ID NO: 934 - DNA, 20 bp, Artificial Sequence
  Description of Artificial Sequence: Synthetic oligonucleotide
cctacctgtcaccaggacca

SEQ ID NO: 935 - DNA, 20 bp, Artificial Sequence
  Description of Artificial Sequence: Synthetic oligonucleotide
ctcttacctgtaccataacc

SEQ ID NO: 936 - DNA, 20 bp, Artificial Sequence
  Description of Artificial Sequence: Synthetic oligonucleotide
cacctacctaagaaccatcc

SEQ ID NO: 937 - DNA, 20 bp, Artificial Sequence
  Description of Artificial Sequence: Synthetic oligonucleotide
actcacgctggatagcctcc

SEQ ID NO: 938 - DNA, 20 bp, Artificial Sequence
  Description of Artificial Sequence: Synthetic oligonucleotide
actcacccagcatccccagc

SEQ ID NO: 939 - DNA, 20 bp, Artificial Sequence
  Description of Artificial Sequence: Synthetic oligonucleotide
cactcaccttagcctgagca

SEQ ID NO: 940 - DNA, 20 bp, Artificial Sequence
  Description of Artificial Sequence: Synthetic oligonucleotide
cacgcacctggacagctgac

SEQ ID NO: 941 - RNA, 20 nt, Artificial Sequence
  Description of Artificial Sequence: Synthetic oligonucleotide
ccuuaccuagggacgcagcc

SEQ ID NO: 942 - RNA, 20 nt, Artificial Sequence
  Description of Artificial Sequence: Synthetic oligonucleotide
ggauccccagcgccagcugc

SEQ ID NO: 943 - RNA, 20 nt, Artificial Sequence
  Description of Artificial Sequence: Synthetic oligonucleotide
agcgccagcugccggccucc

SEQ ID NO: 944 - RNA, 20 nt, Artificial Sequence
  Description of Artificial Sequence: Synthetic oligonucleotide
gcgccagcugccggccucca

SEQ ID NO: 945 - RNA, 20 nt, Artificial Sequence
  Description of Artificial Sequence: Synthetic oligonucleotide
ccuggcucagcgccacgggc

SEQ ID NO: 946 - RNA, 20 nt, Artificial Sequence
  Description of Artificial Sequence: Synthetic oligonucleotide
gcugcaggugcagacaggug

SEQ ID NO: 947 - RNA, 20 nt, Artificial Sequence
  Description of Artificial Sequence: Synthetic oligonucleotide
gcgguaccacgucuuguaga

SEQ ID NO: 948 - RNA, 20 nt, Artificial Sequence
  Description of Artificial Sequence: Synthetic oligonucleotide
ugccugugggaacaaacaga

SEQ ID NO: 949 - RNA, 20 nt, Artificial Sequence
  Description of Artificial Sequence: Synthetic oligonucleotide
cuuacuuucacuauccuggg

SEQ ID NO: 950 - RNA, 20 nt, Artificial Sequence
  Description of Artificial Sequence: Synthetic oligonucleotide
ucccuuacuuucacuauccu

SEQ ID NO: 951 - RNA, 20 nt, Artificial Sequence
  Description of Artificial Sequence: Synthetic oligonucleotide
cucccaggauagugaaagua

SEQ ID NO: 952 - RNA, 20 nt, Artificial Sequence
  Description of Artificial Sequence: Synthetic oligonucleotide
ugaugucugaaagggcagag

SEQ ID NO: 953 - RNA, 20 nt, Artificial Sequence
  Description of Artificial Sequence: Synthetic oligonucleotide
ugcccaggagcuggugcgga

SEQ ID NO: 954 - RNA, 20 nt, Artificial Sequence
  Description of Artificial Sequence: Synthetic oligonucleotide
uugcugccacagaaccagaa

SEQ ID NO: 955 - RNA, 20 nt, Artificial Sequence
  Description of Artificial Sequence: Synthetic oligonucleotide
auucaagggauugaaaaccc

SEQ ID NO: 956 - RNA, 20 nt, Artificial Sequence
  Description of Artificial Sequence: Synthetic oligonucleotide
accugcccaggggauacccg

SEQ ID NO: 957 - RNA, 20 nt, Artificial Sequence
  Description of Artificial Sequence: Synthetic oligonucleotide
cagcggcagccuucugaguc

SEQ ID NO: 958 - RNA, 20 nt, Artificial Sequence
  Description of Artificial Sequence: Synthetic oligonucleotide
gcuacaaacaagcucaucuu

SEQ ID NO: 959 - RNA, 20 nt, Artificial Sequence
  Description of Artificial Sequence: Synthetic oligonucleotide
ccagccaaguacguaaguag

SEQ ID NO: 960 - RNA, 20 nt, Artificial Sequence
  Description of Artificial Sequence: Synthetic oligonucleotide
cuggauaucugugggacaag

SEQ ID NO: 961 - RNA, 20 nt, Artificial Sequence
  Description of Artificial Sequence: Synthetic oligonucleotide
cuuaccugggcuggggaaga

SEQ ID NO: 962 - RNA, 20 nt, Artificial Sequence
  Description of Artificial Sequence: Synthetic oligonucleotide
uucguaucuguaaaaccaag

SEQ ID NO: 963 - RNA, 20 nt, Artificial Sequence
  Description of Artificial Sequence: Synthetic oligonucleotide
uuucaaaaccugucagugau

SEQ ID NO: 964 - RNA, 20 nt, Artificial Sequence
  Description of Artificial Sequence: Synthetic oligonucleotide
uucaaaaccugucagugauu

SEQ ID NO: 965 - RNA, 20 nt, Artificial Sequence
  Description of Artificial Sequence: Synthetic oligonucleotide
ggacccugcauagagagaga

SEQ ID NO: 966 - RNA, 20 nt, Artificial Sequence
  Description of Artificial Sequence: Synthetic oligonucleotide
ugccccagcagacgggcacg

SEQ ID NO: 967 - RNA, 20 nt, Artificial Sequence
  Description of Artificial Sequence: Synthetic oligonucleotide
guuaccugggccaugucccc

SEQ ID NO: 968 - RNA, 20 nt, Artificial Sequence
  Description of Artificial Sequence: Synthetic oligonucleotide
cuuacuguuagauuuauauc

SEQ ID NO: 969 - RNA, 20 nt, Artificial Sequence
  Description of Artificial Sequence: Synthetic oligonucleotide
uuacuguuagauuuauauca

SEQ ID NO: 970 - RNA, 20 nt, Artificial Sequence
  Description of Artificial Sequence: Synthetic oligonucleotide
uuugcuauggaaacacaaac

SEQ ID NO: 971 - RNA, 20 nt, Artificial Sequence
  Description of Artificial Sequence: Synthetic oligonucleotide
uccauagcaaauauccacau

SEQ ID NO: 972 - RNA, 20 nt, Artificial Sequence
  Description of Artificial Sequence: Synthetic oligonucleotide
gcagcaacccucacaaccuu

SEQ ID NO: 973 - RNA, 20 nt, Artificial Sequence
  Description of Artificial Sequence: Synthetic oligonucleotide
cagcaacccucacaaccuuu

SEQ ID NO: 974 - RNA, 20 nt, Artificial Sequence
  Description of Artificial Sequence: Synthetic oligonucleotide
aggcaggcuccccucgccuc

SEQ ID NO: 975 - RNA, 20 nt, Artificial Sequence
  Description of Artificial Sequence: Synthetic oligonucleotide
ggagcagcaggaccagcuuc

SEQ ID NO: 976 - RNA, 20 nt, Artificial Sequence
  Description of Artificial Sequence: Synthetic oligonucleotide
caggaauaccugagcuuucu

SEQ ID NO: 977 - RNA, 20 nt, Artificial Sequence
  Description of Artificial Sequence: Synthetic oligonucleotide
agguuccagauuccauugcu

SEQ ID NO: 978 - RNA, 20 nt, Artificial Sequence
  Description of Artificial Sequence: Synthetic oligonucleotide
cugggcccaggggcugaggc

SEQ ID NO: 979 - RNA, 20 nt, Artificial Sequence
  Description of Artificial Sequence: Synthetic oligonucleotide
gaucgaguggccccaggucc

SEQ ID NO: 980 - RNA, 20 nt, Artificial Sequence
  Description of Artificial Sequence: Synthetic oligonucleotide
ucacccgacuucugaacgug

SEQ ID NO: 981 - RNA, 20 nt, Artificial Sequence
  Description of Artificial Sequence: Synthetic oligonucleotide
uuaccugcccacuguuagcc

SEQ ID NO: 982 - RNA, 20 nt, Artificial Sequence
  Description of Artificial Sequence: Synthetic oligonucleotide
gaagccacaggaagucugug

SEQ ID NO: 983 - RNA, 20 nt, Artificial Sequence
  Description of Artificial Sequence: Synthetic oligonucleotide
acuccaguuccugacggcug

SEQ ID NO: 984 - RNA, 20 nt, Artificial Sequence
  Description of Artificial Sequence: Synthetic oligonucleotide
accuacaggaguaccugacg

SEQ ID NO: 985 - RNA, 20 nt, Artificial Sequence
  Description of Artificial Sequence: Synthetic oligonucleotide
uucccagagcaccagagcca

SEQ ID NO: 986 - RNA, 20 nt, Artificial Sequence
  Description of Artificial Sequence: Synthetic oligonucleotide
acguucagaagucgggugag

SEQ ID NO: 987 - RNA, 20 nt, Artificial Sequence
  Description of Artificial Sequence: Synthetic oligonucleotide
uucagagcaguuugagacag

SEQ ID NO: 988 - RNA, 20 nt, Artificial Sequence
  Description of Artificial Sequence: Synthetic oligonucleotide
ucacccgacuucugaacgug

SEQ ID NO: 989 - RNA, 20 nt, Artificial Sequence
  Description of Artificial Sequence: Synthetic oligonucleotide
acguucagaagucgggugag

SEQ ID NO: 990 - RNA, 20 nt, Artificial Sequence
  Description of Artificial Sequence: Synthetic oligonucleotide
uuuacuaugucucaguggau

SEQ ID NO: 991 - RNA, 20 nt, Artificial Sequence
  Description of Artificial Sequence: Synthetic oligonucleotide
cuuuacuaugucucagugga

SEQ ID NO: 992 - RNA, 20 nt, Artificial Sequence
  Description of Artificial Sequence: Synthetic oligonucleotide
gaagccacaggaagucugug

SEQ ID NO: 993 - RNA, 20 nt, Artificial Sequence
  Description of Artificial Sequence: Synthetic oligonucleotide
uuaccugcccacuguuagcc

SEQ ID NO: 994 - RNA, 20 nt, Artificial Sequence
  Description of Artificial Sequence: Synthetic oligonucleotide
uucagagcaguuugagacag

SEQ ID NO: 995 - RNA, 20 nt, Artificial Sequence
  Description of Artificial Sequence: Synthetic oligonucleotide
acuccaguuccugacggcug

SEQ ID NO: 996 - RNA, 20 nt, Artificial Sequence
  Description of Artificial Sequence: Synthetic oligonucleotide
accuacaggaguaccugacg

SEQ ID NO: 997 - RNA, 20 nt, Artificial Sequence
  Description of Artificial Sequence: Synthetic oligonucleotide
uucccagagcaccagagcca

SEQ ID NO: 998 - RNA, 20 nt, Artificial Sequence
  Description of Artificial Sequence: Synthetic oligonucleotide
agccagaagcugggaauuuc

SEQ ID NO: 999 - RNA, 20 nt, Artificial Sequence
  Description of Artificial Sequence: Synthetic oligonucleotide
uaucaugucguuauuaacug

SEQ ID NO: 1000 - RNA, 20 nt, Artificial Sequence
  Description of Artificial Sequence: Synthetic oligonucleotide
ccugcugggaaacagacaac

SEQ ID NO: 1001 - RNA, 20 nt, Artificial Sequence
  Description of Artificial Sequence: Synthetic oligonucleotide
cacucacagucuaggguggc

SEQ ID NO: 1002 - DNA, 20 bp, Artificial Sequence
  Description of Artificial Sequence: Synthetic oligonucleotide
caaccggcagcgagggaacg

SEQ ID NO: 1003 - RNA, 20 nt, Artificial Sequence
  Description of Artificial Sequence: Synthetic oligonucleotide
acagggcuggggcaggacag

SEQ ID NO: 1004 - RNA, 20 nt, Artificial Sequence
  Description of Artificial Sequence: Synthetic oligonucleotide
cauccaccagcucgcagcac

SEQ ID NO: 1005 - RNA, 20 nt, Artificial Sequence
  Description of Artificial Sequence: Synthetic oligonucleotide
auccaccagcucgcagcaca

SEQ ID NO: 1006 - RNA, 20 nt, Artificial Sequence
  Description of Artificial Sequence: Synthetic oligonucleotide
uccaccagcucgcagcacag

SEQ ID NO: 1007 - RNA, 20 nt, Artificial Sequence
  Description of Artificial Sequence: Synthetic oligonucleotide
ccaccagcucgcagcacagg

SEQ ID NO: 1008 - RNA, 20 nt, Artificial Sequence
  Description of Artificial Sequence: Synthetic oligonucleotide
ugucaccuggcaggaggagg

SEQ ID NO: 1009 - RNA, 20 nt, Artificial Sequence
  Description of Artificial Sequence: Synthetic oligonucleotide
gucaccuggcaggaggaggc

SEQ ID NO: 1010 - RNA, 20 nt, Artificial Sequence
  Description of Artificial Sequence: Synthetic oligonucleotide
ggcacccugcagggagaaga

SEQ ID NO: 1011 - RNA, 20 nt, Artificial Sequence
  Description of Artificial Sequence: Synthetic oligonucleotide
gcacccugcagggagaagaa

SEQ ID NO: 1012 - RNA, 20 nt, Artificial Sequence
  Description of Artificial Sequence: Synthetic oligonucleotide
auucugucguggguaggggc

SEQ ID NO: 1013 - RNA, 20 nt, Artificial Sequence
  Description of Artificial Sequence: Synthetic oligonucleotide
cuccauucugucguggguag

SEQ ID NO: 1014 - RNA, 20 nt, Artificial Sequence
  Description of Artificial Sequence: Synthetic oligonucleotide
ccucgggcugcaaaggagag

SEQ ID NO: 1015 - RNA, 20 nt, Artificial Sequence
  Description of Artificial Sequence: Synthetic oligonucleotide
cgggcugcaaaggagagggg

SEQ ID NO: 1016 - RNA, 20 nt, Artificial Sequence
  Description of Artificial Sequence: Synthetic oligonucleotide
gcugaccuuuccgguauccc

SEQ ID NO: 1017 - RNA, 20 nt, Artificial Sequence
  Description of Artificial Sequence: Synthetic oligonucleotide
cugaccuuuccgguauccca

SEQ ID NO: 1018 - RNA, 20 nt, Artificial Sequence
  Description of Artificial Sequence: Synthetic oligonucleotide
uguugcacugagauggggca

SEQ ID NO: 1019 - RNA, 20 nt, Artificial Sequence
  Description of Artificial Sequence: Synthetic oligonucleotide
cuguugcacugagauggggc

SEQ ID NO: 1020 - RNA, 20 nt, Artificial Sequence
  Description of Artificial Sequence: Synthetic oligonucleotide
gcccugcagcccccagaacc

SEQ ID NO: 1021 - RNA, 20 nt, Artificial Sequence
  Description of Artificial Sequence: Synthetic oligonucleotide
cucacccgcagugacacaca

SEQ ID NO: 1022 - DNA, 20 bp, Artificial Sequence
  Description of Artificial Sequence: Synthetic oligonucleotide
gcagcacccagggcaggacc

SEQ ID NO: 1023 - DNA, 20 bp, Artificial Sequence
  Description of Artificial Sequence: Synthetic oligonucleotide
cagcacccagggcaggacca

SEQ ID NO: 1024 - RNA, 20 nt, Artificial Sequence
  Description of Artificial Sequence: Synthetic oligonucleotide
gucccuguggaacagcagca

SEQ ID NO: 1025 - RNA, 20 nt, Artificial Sequence
  Description of Artificial Sequence: Synthetic oligonucleotide
guggguucaaguucggaugg

SEQ ID NO: 1026 - RNA, 20 nt, Artificial Sequence
  Description of Artificial Sequence: Synthetic oligonucleotide
gccccaccugggucugagcu

SEQ ID NO: 1027 - RNA, 20 nt, Artificial Sequence
  Description of Artificial Sequence: Synthetic oligonucleotide
ggccccaccugggucugagc

SEQ ID NO: 1028 - RNA, 20 nt, Artificial Sequence
  Description of Artificial Sequence: Synthetic oligonucleotide
ccaccugggucugagcuggg

SEQ ID NO: 1029 - RNA, 20 nt, Artificial Sequence
  Description of Artificial Sequence: Synthetic oligonucleotide
aggccucccaggagcccuca

SEQ ID NO: 1030 - RNA, 20 nt, Artificial Sequence
  Description of Artificial Sequence: Synthetic oligonucleotide
cucccaggagcccucaggga

SEQ ID NO: 1031 - RNA, 20 nt, Artificial Sequence
  Description of Artificial Sequence: Synthetic oligonucleotide
cccccagcucacagucacca

SEQ ID NO: 1032 - RNA, 20 nt, Artificial Sequence
  Description of Artificial Sequence: Synthetic oligonucleotide
ggucucaccggugcuuaugu

SEQ ID NO: 1033 - RNA, 20 nt, Artificial Sequence
  Description of Artificial Sequence: Synthetic oligonucleotide
ugcugcgccgacauaagcac

SEQ ID NO: 1034 - RNA, 20 nt, Artificial Sequence
  Description of Artificial Sequence: Synthetic oligonucleotide
ggcagggcugggagagagca

SEQ ID NO: 1035 - RNA, 20 nt, Artificial Sequence
  Description of Artificial Sequence: Synthetic oligonucleotide
cgagagcacgagcaugggug

SEQ ID NO: 1036 - RNA, 20 nt, Artificial Sequence
  Description of Artificial Sequence: Synthetic oligonucleotide
gagcacgagcaugggugagg

SEQ ID NO: 1037 - RNA, 20 nt, Artificial Sequence
  Description of Artificial Sequence: Synthetic oligonucleotide
agcacgagcaugggugagga

SEQ ID NO: 1038 - RNA, 20 nt, Artificial Sequence
  Description of Artificial Sequence: Synthetic oligonucleotide
gcacgagcaugggugaggag

SEQ ID NO: 1039 - RNA, 20 nt, Artificial Sequence
  Description of Artificial Sequence: Synthetic oligonucleotide
cucacccaugcucgugcucu

SEQ ID NO: 1040 - RNA, 20 nt, Artificial Sequence
  Description of Artificial Sequence: Synthetic oligonucleotide
ggugccugcgcgggggaagg

SEQ ID NO: 1041 - RNA, 20 nt, Artificial Sequence
  Description of Artificial Sequence: Synthetic oligonucleotide
gugccugcgcgggggaagga

SEQ ID NO: 1042 - RNA, 20 nt, Artificial Sequence
  Description of Artificial Sequence: Synthetic oligonucleotide
cuuggugccugcgcggggga

SEQ ID NO: 1043 - RNA, 20 nt, Artificial Sequence
  Description of Artificial Sequence: Synthetic oligonucleotide
ggccccagggcccugccgcc

SEQ ID NO: 1044 - RNA, 20 nt, Artificial Sequence
  Description of Artificial Sequence: Synthetic oligonucleotide
ucuacgcucaggcaggggag

SEQ ID NO: 1045 - RNA, 20 nt, Artificial Sequence
  Description of Artificial Sequence: Synthetic oligonucleotide
ccaccaggacggccccccau

SEQ ID NO: 1046 - DNA, 20 bp, Artificial Sequence
  Description of Artificial Sequence: Synthetic oligonucleotide
aggcccaggcggcagggccc

SEQ ID NO: 1047 - RNA, 20 nt, Artificial Sequence
  Description of Artificial Sequence: Synthetic oligonucleotide
ggcccaggcggcagggcccu

SEQ ID NO: 1048 - RNA, 20 nt, Artificial Sequence
  Description of Artificial Sequence: Synthetic oligonucleotide
acgacuggccagggcgccug

SEQ ID NO: 1049 - RNA, 20 nt, Artificial Sequence
  Description of Artificial Sequence: Synthetic oligonucleotide
caccgcccagacgacuggcc

SEQ ID NO: 1050 - RNA, 20 nt, Artificial Sequence
  Description of Artificial Sequence: Synthetic oligonucleotide
cuacaacugggcuggcggcc

SEQ ID NO: 1051 - RNA, 20 nt, Artificial Sequence
  Description of Artificial Sequence: Synthetic oligonucleotide
caccuaccuaagaaccaucc

SEQ ID NO: 1052 - RNA, 20 nt, Artificial Sequence
  Description of Artificial Sequence: Synthetic oligonucleotide
ggagucugagagauggagag

SEQ ID NO: 1053 - DNA, 20 bp, Artificial Sequence
  Description of Artificial Sequence: Synthetic oligonucleotide
cagcaaccagacggacaagc

SEQ ID NO: 1054 - RNA, 20 nt, Artificial Sequence
  Description of Artificial Sequence: Synthetic oligonucleotide
gugucacacaacugcccaac

SEQ ID NO: 1055 - RNA, 20 nt, Artificial Sequence
  Description of Artificial Sequence: Synthetic oligonucleotide
agccggccaguuccaaaccc

SEQ ID NO: 1056 - RNA, 20 nt, Artificial Sequence
  Description of Artificial Sequence: Synthetic oligonucleotide
caguuccaaacccugguggu

SEQ ID NO: 1057 - RNA, 20 nt, Artificial Sequence
  Description of Artificial Sequence: Synthetic oligonucleotide
cggccaguuccaaacccugg

SEQ ID NO: 1058 - RNA, 20 nt, Artificial Sequence
  Description of Artificial Sequence: Synthetic oligonucleotide
ggacccagacuagcagcacc

SEQ ID NO: 1059 - RNA, 20 nt, Artificial Sequence
  Description of Artificial Sequence: Synthetic oligonucleotide
gacguuaccucgugcggccc

SEQ ID NO: 1060 - RNA, 20 nt, Artificial Sequence
  Description of Artificial Sequence: Synthetic oligonucleotide
ucccugcagagaaacacacu

SEQ ID NO: 1061 - RNA, 20 nt, Artificial Sequence
  Description of Artificial Sequence: Synthetic oligonucleotide
gagacucaccaggggcuggc

SEQ ID NO: 1062 - RNA, 20 nt, Artificial Sequence
  Description of Artificial Sequence: Synthetic oligonucleotide
ccuccuucuuugaggagaaa

SEQ ID NO: 1063 - RNA, 20 nt, Artificial Sequence
  Description of Artificial Sequence: Synthetic oligonucleotide
gggguuccagggccugucug

SEQ ID NO: 1064 - RNA, 20 nt, Artificial Sequence
  Description of Artificial Sequence: Synthetic oligonucleotide
uucucucuggaagggcacaa

SEQ ID NO: 1065 - RNA, 20 nt, Artificial Sequence
  Description of Artificial Sequence: Synthetic oligonucleotide
ccaguggcgagagaagaccc

SEQ ID NO: 1066 - RNA, 20 nt, Artificial Sequence
  Description of Artificial Sequence: Synthetic oligonucleotide
ugcccagccacugaggccug

SEQ ID NO: 1067 - RNA, 20 nt, Artificial Sequence
  Description of Artificial Sequence: Synthetic oligonucleotide
cgacuggccagggcgccugu

SEQ ID NO: 1068 - RNA, 20 nt, Artificial Sequence
  Description of Artificial Sequence: Synthetic oligonucleotide
accgcccagacgacuggcca

SEQ ID NO: 1069 - RNA, 20 nt, Artificial Sequence
  Description of Artificial Sequence: Synthetic oligonucleotide
guuucugcagccgcuuuggg

SEQ ID NO: 1070 - RNA, 20 nt, Artificial Sequence
  Description of Artificial Sequence: Synthetic oligonucleotide
uuaccuggagccacccaaag

SEQ ID NO: 1071 - RNA, 20 nt, Artificial Sequence
  Description of Artificial Sequence: Synthetic oligonucleotide
ucacuaggugagcaaaagag

SEQ ID NO: 1072 - RNA, 20 nt, Artificial Sequence
  Description of Artificial Sequence: Synthetic oligonucleotide
gccucuccagccaggggcug

SEQ ID NO: 1073 - RNA, 20 nt, Artificial Sequence
  Description of Artificial Sequence: Synthetic oligonucleotide
cuuggcagcaucagccagac

SEQ ID NO: 1074 - RNA, 20 nt, Artificial Sequence
  Description of Artificial Sequence: Synthetic oligonucleotide
ccacugggcgggaaagagaa

SEQ ID NO: 1075 - RNA, 20 nt, Artificial Sequence
  Description of Artificial Sequence: Synthetic oligonucleotide
acauacucgaggccuggccc

SEQ ID NO: 1076 - RNA, 20 nt, Artificial Sequence
  Description of Artificial Sequence: Synthetic oligonucleotide
ccugcagccccgcguccagc

SEQ ID NO: 1077 - RNA, 20 nt, Artificial Sequence
  Description of Artificial Sequence: Synthetic oligonucleotide
cgcguccagcuggaugagcg

SEQ ID NO: 1078 - RNA, 20 nt, Artificial Sequence
  Description of Artificial Sequence: Synthetic oligonucleotide
ugggccaggccucgaguaug

SEQ ID NO: 1079 - RNA, 20 nt, Artificial Sequence
  Description of Artificial Sequence: Synthetic oligonucleotide
gggaguuacccagaacagug

SEQ ID NO: 1080 - RNA, 20 nt, Artificial Sequence
  Description of Artificial Sequence: Synthetic oligonucleotide
ccugccccaagucagcccca

SEQ ID NO: 1081 - RNA, 20 nt, Artificial Sequence
  Description of Artificial Sequence: Synthetic oligonucleotide
gccagggccgagucccuguc

SEQ ID NO: 1082 - RNA, 20 nt, Artificial Sequence
  Description of Artificial Sequence: Synthetic oligonucleotide
ccagggccgagucccugucc

SEQ ID NO: 1083 - RNA, 20 nt, Artificial Sequence
  Description of Artificial Sequence: Synthetic oligonucleotide
gccccagggcccagagucca

SEQ ID NO: 1084 - RNA, 20 nt, Artificial Sequence
  Description of Artificial Sequence: Synthetic oligonucleotide
augugagccaggcccaggcu

SEQ ID NO: 1085 - RNA, 20 nt, Artificial Sequence
  Description of Artificial Sequence: Synthetic oligonucleotide
gaggaguccacuuggcagug

SEQ ID NO: 1086 - RNA, 20 nt, Artificial Sequence
  Description of Artificial Sequence: Synthetic oligonucleotide
gagucacugaaaagaguaga

SEQ ID NO: 1087 - RNA, 20 nt, Artificial Sequence
  Description of Artificial Sequence: Synthetic oligonucleotide
cuggacaagaacgcuuugug

SEQ ID NO: 1088 - RNA, 20 nt, Artificial Sequence
  Description of Artificial Sequence: Synthetic oligonucleotide
ccaucccagaggaguuucuc

SEQ ID NO: 1089 - RNA, 20 nt, Artificial Sequence
  Description of Artificial Sequence: Synthetic oligonucleotide
uggcaaugccagcuguacca

SEQ ID NO: 1090 - RNA, 20 nt, Artificial Sequence
  Description of Artificial Sequence: Synthetic oligonucleotide
uaccagggggagaggcuucu

SEQ ID NO: 1091 - RNA, 20 nt, Artificial Sequence
  Description of Artificial Sequence: Synthetic oligonucleotide
ggcauugccaaggcugggaa

SEQ ID NO: 1092 - RNA, 20 nt, Artificial Sequence
  Description of Artificial Sequence: Synthetic oligonucleotide
ggcaccuauggagaaaguac

SEQ ID NO: 1093 - RNA, 20 nt, Artificial Sequence
  Description of Artificial Sequence: Synthetic oligonucleotide
agacaggugagccagggaca

SEQ ID NO: 1094 - RNA, 20 nt, Artificial Sequence
  Description of Artificial Sequence: Synthetic oligonucleotide
ggcucaccugucuucuccaa

SEQ ID NO: 1095 - RNA, 20 nt, Artificial Sequence
  Description of Artificial Sequence: Synthetic oligonucleotide
gucgccacugugagaagaga

SEQ ID NO: 1096 - RNA, 20 nt, Artificial Sequence
  Description of Artificial Sequence: Synthetic oligonucleotide
gcaggcucagagcaagauag

SEQ ID NO: 1097 - RNA, 20 nt, Artificial Sequence
  Description of Artificial Sequence: Synthetic oligonucleotide
gcuggagcaagaaccggagc

SEQ ID NO: 1098 - RNA, 20 nt, Artificial Sequence
  Description of Artificial Sequence: Synthetic oligonucleotide
acucaccuuugcagaagaca

SEQ ID NO: 1099 - RNA, 20 nt, Artificial Sequence
  Description of Artificial Sequence: Synthetic oligonucleotide
cacucaccuuugcagaagac

SEQ ID NO: 1100 - RNA, 20 nt, Artificial Sequence
  Description of Artificial Sequence: Synthetic oligonucleotide
agggccagguccugguagcc

SEQ ID NO: 1101 - RNA, 20 nt, Artificial Sequence
  Description of Artificial Sequence: Synthetic oligonucleotide
ggcccagccugcugugguac

SEQ ID NO: 1102 - RNA, 20 nt, Artificial Sequence
  Description of Artificial Sequence: Synthetic oligonucleotide
gcuucggcaggcugacagcc

SEQ ID NO: 1103 - RNA, 20 nt, Artificial Sequence
  Description of Artificial Sequence: Synthetic oligonucleotide
uauccaaggacugagggcca

SEQ ID NO: 1104 - RNA, 20 nt, Artificial Sequence
  Description of Artificial Sequence: Synthetic oligonucleotide
ggaacccagauuuauguaau

SEQ ID NO: 1105 - RNA, 20 nt, Artificial Sequence
  Description of Artificial Sequence: Synthetic oligonucleotide
gcucaccaauuacauaaauc

SEQ ID NO: 1106 - RNA, 20 nt, Artificial Sequence
  Description of Artificial Sequence: Synthetic oligonucleotide
cucaccaauuacauaaaucu

SEQ ID NO: 1107 - RNA, 20 nt, Artificial Sequence
  Description of Artificial Sequence: Synthetic oligonucleotide
cucagcugaaccuggcuacc

SEQ ID NO: 1108 - RNA, 20 nt, Artificial Sequence
  Description of Artificial Sequence: Synthetic oligonucleotide
ggcgucucaaacagguaucu

SEQ ID NO: 1109 - RNA, 20 nt, Artificial Sequence
  Description of Artificial Sequence: Synthetic oligonucleotide
caaagccugaagagaaaucc

SEQ ID NO: 1110 - RNA, 20 nt, Artificial Sequence
  Description of Artificial Sequence: Synthetic oligonucleotide
agagccugaaggagaagucu

SEQ ID NO: 1111 - RNA, 20 nt, Artificial Sequence
  Description of Artificial Sequence: Synthetic oligonucleotide
ucccaguaccgggaaggcga

SEQ ID NO: 1112 - RNA, 20 nt, Artificial Sequence
  Description of Artificial Sequence: Synthetic oligonucleotide
gguuccuguggagcacaggg

SEQ ID NO: 1113 - RNA, 20 nt, Artificial Sequence
  Description of Artificial Sequence: Synthetic oligonucleotide
ugggguuccuguggagcaca

SEQ ID NO: 1114 - RNA, 20 nt, Artificial Sequence
  Description of Artificial Sequence: Synthetic oligonucleotide
ucauuuccuagaugggagac

SEQ ID NO: 1115 - RNA, 20 nt, Artificial Sequence
  Description of Artificial Sequence: Synthetic oligonucleotide
uuccuagaugggagacaggc

SEQ ID NO: 1116 - RNA, 20 nt, Artificial Sequence
  Description of Artificial Sequence: Synthetic oligonucleotide
ccaggugucugaggaggaag

SEQ ID NO: 1117 - RNA, 20 nt, Artificial Sequence
  Description of Artificial Sequence: Synthetic oligonucleotide
gugucugaggaggaagggga

SEQ ID NO: 1118 - RNA, 20 nt, Artificial Sequence
  Description of Artificial Sequence: Synthetic oligonucleotide
uaguccugggugggguaggg

SEQ ID NO: 1119 - RNA, 20 nt, Artificial Sequence
  Description of Artificial Sequence: Synthetic oligonucleotide
aguccugggugggguagggu

SEQ ID NO: 1120 - RNA, 20 nt, Artificial Sequence
  Description of Artificial Sequence: Synthetic oligonucleotide
cauuaccucauaguaggcaa

SEQ ID NO: 1121 - RNA, 20 nt, Artificial Sequence
  Description of Artificial Sequence: Synthetic oligonucleotide
ccauuaccucauaguaggca

SEQ ID NO: 1122 - RNA, 20 nt, Artificial Sequence
  Description of Artificial Sequence: Synthetic oligonucleotide
acagaucugagcagauaaca

SEQ ID NO: 1123 - RNA, 20 nt, Artificial Sequence
  Description of Artificial Sequence: Synthetic oligonucleotide
uccuacccacugguugcccu

SEQ ID NO: 1124 - RNA, 20 nt, Artificial Sequence
  Description of Artificial Sequence: Synthetic oligonucleotide
aggugcaguaccugaaggac

SEQ ID NO: 1125 - RNA, 20 nt, Artificial Sequence
  Description of Artificial Sequence: Synthetic oligonucleotide
caggcagcuggcgggcgcca

SEQ ID NO: 1126 - RNA, 20 nt, Artificial Sequence
  Description of Artificial Sequence: Synthetic oligonucleotide
gacuuccagggcuccuucug

SEQ ID NO: 1127 - RNA, 20 nt, Artificial Sequence
  Description of Artificial Sequence: Synthetic oligonucleotide
cauccagauacauuuuguca

SEQ ID NO: 1128 - RNA, 20 nt, Artificial Sequence
  Description of Artificial Sequence: Synthetic oligonucleotide
accugccaaacacagacagu

SEQ ID NO: 1129 - RNA, 20 nt, Artificial Sequence
  Description of Artificial Sequence: Synthetic oligonucleotide
cgugcagaugcaauggucca

SEQ ID NO: 1130 - RNA, 20 nt, Artificial Sequence
  Description of Artificial Sequence: Synthetic oligonucleotide
uguaacuguaacaaaacaua

SEQ ID NO: 1131 - RNA, 20 nt, Artificial Sequence
  Description of Artificial Sequence: Synthetic oligonucleotide
acuuaccaccgaccaugcau

SEQ ID NO: 1132 - RNA, 20 nt, Artificial Sequence
  Description of Artificial Sequence: Synthetic oligonucleotide
cuuaccaaaaaccuugacug

SEQ ID NO: 1133 - RNA, 20 nt, Artificial Sequence
  Description of Artificial Sequence: Synthetic oligonucleotide
ccaguccaaaucuucgauga

SEQ ID NO: 1134 - RNA, 20 nt, Artificial Sequence
  Description of Artificial Sequence: Synthetic oligonucleotide
caguccaaaucuucgaugau

SEQ ID NO: 1135 - RNA, 20 nt, Artificial Sequence
  Description of Artificial Sequence: Synthetic oligonucleotide
aaaccaugugauauuugcuu

SEQ ID NO: 1136 - RNA, 20 nt, Artificial Sequence
  Description of Artificial Sequence: Synthetic oligonucleotide
auguuccacacuuuauuucc

SEQ ID NO: 1137 - RNA, 20 nt, Artificial Sequence
  Description of Artificial Sequence: Synthetic oligonucleotide
ucacguugaggagugguguu

SEQ ID NO: 1138 - RNA, 20 nt, Artificial Sequence
  Description of Artificial Sequence: Synthetic oligonucleotide
cauugucuagggauauaaag

SEQ ID NO: 1139 - RNA, 20 nt, Artificial Sequence
  Description of Artificial Sequence: Synthetic oligonucleotide
acauugucuagggauauaaa

SEQ ID NO: 1140 - RNA, 20 nt, Artificial Sequence
  Description of Artificial Sequence: Synthetic oligonucleotide
gacauugucuagggauauaa

SEQ ID NO: 1141 - RNA, 20 nt, Artificial Sequence
  Description of Artificial Sequence: Synthetic oligonucleotide
uggccaggacauuccaucuu

SEQ ID NO: 1142 - RNA, 20 nt, Artificial Sequence
  Description of Artificial Sequence: Synthetic oligonucleotide
ccauucuaggaacaaaauau

SEQ ID NO: 1143 - RNA, 20 nt, Artificial Sequence
  Description of Artificial Sequence: Synthetic oligonucleotide
gagcuuccaagucuucucca

SEQ ID NO: 1144 - RNA, 20 nt, Artificial Sequence
  Description of Artificial Sequence: Synthetic oligonucleotide
uccccgaaaaggucgaauuu

SEQ ID NO: 1145 - RNA, 20 nt, Artificial Sequence
  Description of Artificial Sequence: Synthetic oligonucleotide
augaagaacagucacaggac

SEQ ID NO: 1146 - RNA, 20 nt, Artificial Sequence
  Description of Artificial Sequence: Synthetic oligonucleotide
gauuucgucuguaggcacaa

SEQ ID NO: 1147 - RNA, 20 nt, Artificial Sequence
  Description of Artificial Sequence: Synthetic oligonucleotide
uaaacuuaccugaaacagcc

SEQ ID NO: 1148 - RNA, 20 nt, Artificial Sequence
  Description of Artificial Sequence: Synthetic oligonucleotide
auucagacagugccuucaug

SEQ ID NO: 1149 - RNA, 20 nt, Artificial Sequence
  Description of Artificial Sequence: Synthetic oligonucleotide
guugcacucgauugggacag

SEQ ID NO: 1150 - RNA, 20 nt, Artificial Sequence
  Description of Artificial Sequence: Synthetic oligonucleotide
uuauuucaagcccugauuga

SEQ ID NO: 1151 - RNA, 20 nt, Artificial Sequence
  Description of Artificial Sequence: Synthetic oligonucleotide
uuaccuguguaacuuuuaua

SEQ ID NO: 1152 - RNA, 20 nt, Artificial Sequence
  Description of Artificial Sequence: Synthetic oligonucleotide
auuguuccuggaauuugggg

SEQ ID NO: 1153 - RNA, 20 nt, Artificial Sequence
  Description of Artificial Sequence: Synthetic oligonucleotide
auuauaccugccaugccgua

SEQ ID NO: 1154 - RNA, 20 nt, Artificial Sequence
  Description of Artificial Sequence: Synthetic oligonucleotide
guuccuggaauuuggggagg

SEQ ID NO: 1155 - RNA, 20 nt, Artificial Sequence
  Description of Artificial Sequence: Synthetic oligonucleotide
cugccaugccguaaggcaag

SEQ ID NO: 1156 - RNA, 20 nt, Artificial Sequence
  Description of Artificial Sequence: Synthetic oligonucleotide
ucuaccuuuggugaacccgu

SEQ ID NO: 1157 - RNA, 20 nt, Artificial Sequence
  Description of Artificial Sequence: Synthetic oligonucleotide
cuuaccuuagcuccuucuaa

SEQ ID NO: 1158 - RNA, 20 nt, Artificial Sequence
  Description of Artificial Sequence: Synthetic oligonucleotide
gggaugucgacuccuagggg

SEQ ID NO: 1159 - RNA, 20 nt, Artificial Sequence
  Description of Artificial Sequence: Synthetic oligonucleotide
cgagggcaccaugcuucaag

SEQ ID NO: 1160 - RNA, 20 nt, Artificial Sequence
  Description of Artificial Sequence: Synthetic oligonucleotide
aaacucacuuuaugcuaggg

SEQ ID NO: 1161 - RNA, 20 nt, Artificial Sequence
  Description of Artificial Sequence: Synthetic oligonucleotide
cucacuuuaugcuagggagg

SEQ ID NO: 1162 - RNA, 20 nt, Artificial Sequence
  Description of Artificial Sequence: Synthetic oligonucleotide
cuucaccugcauuuaaagaa

SEQ ID NO: 1163 - RNA, 20 nt, Artificial Sequence
  Description of Artificial Sequence: Synthetic oligonucleotide
ccaccagauuagcucuggcc

SEQ ID NO: 1164 - RNA, 20 nt, Artificial Sequence
  Description of Artificial Sequence: Synthetic oligonucleotide
cuaccuuuggugaacccguu

SEQ ID NO: 1165 - RNA, 20 nt, Artificial Sequence
  Description of Artificial Sequence: Synthetic oligonucleotide
auguuccagauguccagaua

SEQ ID NO: 1166 - RNA, 20 nt, Artificial Sequence
  Description of Artificial Sequence: Synthetic oligonucleotide
uguuccagauguccagauau

SEQ ID NO: 1167 - RNA, 20 nt, Artificial Sequence
  Description of Artificial Sequence: Synthetic oligonucleotide
agauagacaaacaaguugga

SEQ ID NO: 1168 - RNA, 20 nt, Artificial Sequence
  Description of Artificial Sequence: Synthetic oligonucleotide
agcuugcaccaagucacaug

SEQ ID NO: 1169 - RNA, 20 nt, Artificial Sequence
  Description of Artificial Sequence: Synthetic oligonucleotide
acccaccuuggugccuucuc

SEQ ID NO: 1170 - RNA, 20 nt, Artificial Sequence
  Description of Artificial Sequence: Synthetic oligonucleotide
acucacgcuggauagccucc

SEQ ID NO: 1171 - RNA, 20 nt, Artificial Sequence
  Description of Artificial Sequence: Synthetic oligonucleotide
uggaguaccugaggaauauc

SEQ ID NO: 1172 - RNA, 20 nt, Artificial Sequence
  Description of Artificial Sequence: Synthetic oligonucleotide
uuaccccacuuaacuaucuu

SEQ ID NO: 1173 - RNA, 20 nt, Artificial Sequence
  Description of Artificial Sequence: Synthetic oligonucleotide
ucgaucuaugaaaaagacag

SEQ ID NO: 1174 - RNA, 18 nt, Artificial Sequence
  Description of Artificial Sequence: Synthetic oligonucleotide
uaccccacuuaacuaucu

SEQ ID NO: 1175 - RNA, 20 nt, Artificial Sequence
  Description of Artificial Sequence: Synthetic oligonucleotide
acucacgcuggauagccucc

SEQ ID NO: 1176 - RNA, 20 nt, Artificial Sequence
  Description of Artificial Sequence: Synthetic oligonucleotide
cucagguacuccaaagauuc

SEQ ID NO: 1177 - RNA, 20 nt, Artificial Sequence
  Description of Artificial Sequence: Synthetic oligonucleotide
cuuaccccacuuaacuaucu

SEQ ID NO: 1178 - RNA, 20 nt, Artificial Sequence
  Description of Artificial Sequence: Synthetic oligonucleotide
cauuugccagacagaaccuc

SEQ ID NO: 1179 - RNA, 20 nt, Artificial Sequence
  Description of Artificial Sequence: Synthetic oligonucleotide
aaacaagaccaaaaggcuaa

SEQ ID NO: 1180 - RNA, 20 nt, Artificial Sequence
  Description of Artificial Sequence: Synthetic oligonucleotide
guaagccaagaaagaaaucc

SEQ ID NO: 1181 - RNA, 20 nt, Artificial Sequence
  Description of Artificial Sequence: Synthetic oligonucleotide
gcuucagauucugaaugagc

SEQ ID NO: 1182 - RNA, 20 nt, Artificial Sequence
  Description of Artificial Sequence: Synthetic oligonucleotide
uuaaaacaaaaugaaaugaa

SEQ ID NO: 1183 - RNA, 20 nt, Artificial Sequence
  Description of Artificial Sequence: Synthetic oligonucleotide
guuccucagcuuccuucaga

SEQ ID NO: 1184 - RNA, 20 nt, Artificial Sequence
  Description of Artificial Sequence: Synthetic oligonucleotide
caaagagcaagagauucuga

SEQ ID NO: 1185 - RNA, 20 nt, Artificial Sequence
  Description of Artificial Sequence: Synthetic oligonucleotide
aaagagcaagagauucugaa

SEQ ID NO: 1186 - RNA, 20 nt, Artificial Sequence
  Description of Artificial Sequence: Synthetic oligonucleotide
acacagcacuaucugaaacc

SEQ ID NO: 1187 - DNA, 20 bp, Artificial Sequence
  Description of Artificial Sequence: Synthetic oligonucleotide
cacccagaaaacaacacagc

SEQ ID NO: 1188 - RNA, 20 nt, Artificial Sequence
  Description of Artificial Sequence: Synthetic oligonucleotide
uaccaaguugaaaugaauca

SEQ ID NO: 1189 - RNA, 20 nt, Artificial Sequence
  Description of Artificial Sequence: Synthetic oligonucleotide
augaaucaagggcaguccca

SEQ ID NO: 1190 - RNA, 20 nt, Artificial Sequence
  Description of Artificial Sequence: Synthetic oligonucleotide
agggcagucccaagguacag

SEQ ID NO: 1191 - RNA, 20 nt, Artificial Sequence
  Description of Artificial Sequence: Synthetic oligonucleotide
guuccaaaaacccucacacc

SEQ ID NO: 1192 - RNA, 20 nt, Artificial Sequence
  Description of Artificial Sequence: Synthetic oligonucleotide
gaaacagcacuugaaucaac

SEQ ID NO: 1193 - RNA, 20 nt, Artificial Sequence
  Description of Artificial Sequence: Synthetic oligonucleotide
auuacaaauaaagaauaaag

SEQ ID NO: 1194 - RNA, 20 nt, Artificial Sequence
  Description of Artificial Sequence: Synthetic oligonucleotide
uaauguccaaaugggacugg

SEQ ID NO: 1195 - RNA, 20 nt, Artificial Sequence
  Description of Artificial Sequence: Synthetic oligonucleotide
caaagcaagaucuucuucac

SEQ ID NO: 1196 - RNA, 20 nt, Artificial Sequence
  Description of Artificial Sequence: Synthetic oligonucleotide
acaacaagcuucaguucuac

SEQ ID NO: 1197 - RNA, 20 nt, Artificial Sequence
  Description of Artificial Sequence: Synthetic oligonucleotide
cugcgcaacuugcucagcaa

SEQ ID NO: 1198 - RNA, 20 nt, Artificial Sequence
  Description of Artificial Sequence: Synthetic oligonucleotide
cacucagaccccuccccaga

SEQ ID NO: 1199 - RNA, 20 nt, Artificial Sequence
  Description of Artificial Sequence: Synthetic oligonucleotide
uuuuuccauguuuuguuuuc

SEQ ID NO: 1200 - RNA, 20 nt, Artificial Sequence
  Description of Artificial Sequence: Synthetic oligonucleotide
uuaccuacacaucugcaaga

SEQ ID NO: 1201 - RNA, 20 nt, Artificial Sequence
  Description of Artificial Sequence: Synthetic oligonucleotide
acacuuacccacuuagcaau

SEQ ID NO: 1202 - RNA, 20 nt, Artificial Sequence
  Description of Artificial Sequence: Synthetic oligonucleotide
caugcagaauggcagcacau

SEQ ID NO: 1203 - RNA, 20 nt, Artificial Sequence
  Description of Artificial Sequence: Synthetic oligonucleotide
aagcucaggaggagaaaaaa

SEQ ID NO: 1204 - RNA, 20 nt, Artificial Sequence
  Description of Artificial Sequence: Synthetic oligonucleotide
cgcaagccaggcuaaacagu

SEQ ID NO: 1205 - RNA, 20 nt, Artificial Sequence
  Description of Artificial Sequence: Synthetic oligonucleotide
uucuccccagucucagccga

SEQ ID NO: 1206 - RNA, 20 nt, Artificial Sequence
  Description of Artificial Sequence: Synthetic oligonucleotide
uggucaggaaaagcagccau

SEQ ID NO: 1207 - RNA, 20 nt, Artificial Sequence
  Description of Artificial Sequence: Synthetic oligonucleotide
cuaguccaggguguggcuuc

SEQ ID NO: 1208 - RNA, 20 nt, Artificial Sequence
  Description of Artificial Sequence: Synthetic oligonucleotide
ccccaaaaucaacauggcag

SEQ ID NO: 1209 - RNA, 20 nt, Artificial Sequence
  Description of Artificial Sequence: Synthetic oligonucleotide
ugugauccagcagccuucuu

SEQ ID NO: 1210 - RNA, 20 nt, Artificial Sequence
  Description of Artificial Sequence: Synthetic oligonucleotide
gaccagaucaaggccauaag

SEQ ID NO: 1211 - RNA, 20 nt, Artificial Sequence
  Description of Artificial Sequence: Synthetic oligonucleotide
caagacaagaaaagcaugaa

SEQ ID NO: 1212 - RNA, 20 nt, Artificial Sequence
  Description of Artificial Sequence: Synthetic oligonucleotide
cugaacagggacuguuagga

SEQ ID NO: 1213 - RNA, 20 nt, Artificial Sequence
  Description of Artificial Sequence: Synthetic oligonucleotide
ccagagcucagaguggcaac

SEQ ID NO: 1214 - RNA, 20 nt, Artificial Sequence
  Description of Artificial Sequence: Synthetic oligonucleotide
uugcugcagacgccccguga

SEQ ID NO: 1215 - RNA, 20 nt, Artificial Sequence
  Description of Artificial Sequence: Synthetic oligonucleotide
cugcagacgccccgugacgg

SEQ ID NO: 1216 - RNA, 20 nt, Artificial Sequence
  Description of Artificial Sequence: Synthetic oligonucleotide
cgacaagcagugccuuugcu

SEQ ID NO: 1217 - RNA, 20 nt, Artificial Sequence
  Description of Artificial Sequence: Synthetic oligonucleotide
gcccagaacgugauugacua

SEQ ID NO: 1218 - RNA, 20 nt, Artificial Sequence
  Description of Artificial Sequence: Synthetic oligonucleotide
ugugccagggguguuaugac

SEQ ID NO: 1219 - RNA, 20 nt, Artificial Sequence
  Description of Artificial Sequence: Synthetic oligonucleotide
cagauccagucugauggcag

SEQ ID NO: 1220 - RNA, 20 nt, Artificial Sequence
  Description of Artificial Sequence: Synthetic oligonucleotide
uguacacgauggucagccau

SEQ ID NO: 1221 - RNA, 20 nt, Artificial Sequence
  Description of Artificial Sequence: Synthetic oligonucleotide
uuuuaccuuggggcucugac

SEQ ID NO: 1222 - RNA, 20 nt, Artificial Sequence
  Description of Artificial Sequence: Synthetic oligonucleotide
agccccaagguaaaaaggcc

SEQ ID NO: 1223 - RNA, 20 nt, Artificial Sequence
  Description of Artificial Sequence: Synthetic oligonucleotide
gagccccaagguaaaaaggc

SEQ ID NO: 1224 - RNA, 20 nt, Artificial Sequence
  Description of Artificial Sequence: Synthetic oligonucleotide
cagcucacagugugccacca

SEQ ID NO: 1225 - RNA, 20 nt, Artificial Sequence
  Description of Artificial Sequence: Synthetic oligonucleotide
uaugaccagauggaccuggc

SEQ ID NO: 1226 - RNA, 20 nt, Artificial Sequence
  Description of Artificial Sequence: Synthetic oligonucleotide
acuggaccaguaugucuucc

SEQ ID NO: 1227 - RNA, 20 nt, Artificial Sequence
  Description of Artificial Sequence: Synthetic oligonucleotide
ugucuuccaggacucccagc

SEQ ID NO: 1228 - RNA, 20 nt, Artificial Sequence
  Description of Artificial Sequence: Synthetic oligonucleotide
uucaaccaggagccagccuc

SEQ ID NO: 1229 - RNA, 20 nt, Artificial Sequence
  Description of Artificial Sequence: Synthetic oligonucleotide
gaccagauucccaguauguu

SEQ ID NO: 1230 - RNA, 20 nt, Artificial Sequence
  Description of Artificial Sequence: Synthetic oligonucleotide
uaacauacugggaaucuggu

SEQ ID NO: 1231 - RNA, 20 nt, Artificial Sequence
  Description of Artificial Sequence: Synthetic oligonucleotide
aaaggcacugcaagagacaa

SEQ ID NO: 1232 - RNA, 20 nt, Artificial Sequence
  Description of Artificial Sequence: Synthetic oligonucleotide
cucuggcaaaucucugaggc

SEQ ID NO: 1233 - RNA, 20 nt, Artificial Sequence
  Description of Artificial Sequence: Synthetic oligonucleotide
agccaaguacccccucccag

SEQ ID NO: 1234 - RNA, 20 nt, Artificial Sequence
  Description of Artificial Sequence: Synthetic oligonucleotide
accucccgagcaaacaugac

SEQ ID NO: 1235 - RNA, 20 nt, Artificial Sequence
  Description of Artificial Sequence: Synthetic oligonucleotide
ccuuaccugucauguuugcu

SEQ ID NO: 1236 - RNA, 20 nt, Artificial Sequence
  Description of Artificial Sequence: Synthetic oligonucleotide
ugcucuggagauggagaagc

SEQ ID NO: 1237 - RNA, 20 nt, Artificial Sequence
  Description of Artificial Sequence: Synthetic oligonucleotide
cccacccaaugcccggcagc

SEQ ID NO: 1238 - RNA, 20 nt, Artificial Sequence
  Description of Artificial Sequence: Synthetic oligonucleotide
aggccauuuuggaagcuugu

SEQ ID NO: 1239 - RNA, 20 nt, Artificial Sequence
  Description of Artificial Sequence: Synthetic oligonucleotide
accggcucugcaaaggccag

SEQ ID NO: 1240 - RNA, 20 nt, Artificial Sequence
  Description of Artificial Sequence: Synthetic oligonucleotide
uggugcaggccaggcuggag

SEQ ID NO: 1241 - RNA, 20 nt, Artificial Sequence
  Description of Artificial Sequence: Synthetic oligonucleotide
gaacggcagcuggcccaagg

SEQ ID NO: 1242 - RNA, 20 nt, Artificial Sequence
  Description of Artificial Sequence: Synthetic oligonucleotide
ggcccaaggaggccuggcug

SEQ ID NO: 1243 - RNA, 20 nt, Artificial Sequence
  Description of Artificial Sequence: Synthetic oligonucleotide
gacacgagugauugcugugc

SEQ ID NO: 1244 - RNA, 20 nt, Artificial Sequence
  Description of Artificial Sequence: Synthetic oligonucleotide
cuggucagggcaagagcuau

SEQ ID NO: 1245 - RNA, 20 nt, Artificial Sequence
  Description of Artificial Sequence: Synthetic oligonucleotide
gggcccacagccacucgugg

SEQ ID NO: 1246 - RNA, 20 nt, Artificial Sequence
  Description of Artificial Sequence: Synthetic oligonucleotide
uuccagaagaagcugcuccg

SEQ ID NO: 1247 - RNA, 20 nt, Artificial Sequence
  Description of Artificial Sequence: Synthetic oligonucleotide
ccugguccagagccugagca

SEQ ID NO: 1248 - RNA, 20 nt, Artificial Sequence
  Description of Artificial Sequence: Synthetic oligonucleotide
cagacaucaaaguacccuac

SEQ ID NO: 1249 - RNA, 20 nt, Artificial Sequence
  Description of Artificial Sequence: Synthetic oligonucleotide
acaucaaaguacccuacagg

SEQ ID NO: 1250 - RNA, 20 nt, Artificial Sequence
  Description of Artificial Sequence: Synthetic oligonucleotide
cgcccagguccucacgucug

SEQ ID NO: 1251 - RNA, 20 nt, Artificial Sequence
  Description of Artificial Sequence: Synthetic oligonucleotide
cuuaguccaacacccaccgc

SEQ ID NO: 1252 - RNA, 20 nt, Artificial Sequence
  Description of Artificial Sequence: Synthetic oligonucleotide
ccuccugcaaugcuuccugg

SEQ ID NO: 1253 - DNA, 20 bp, Artificial Sequence
  Description of Artificial Sequence: Synthetic oligonucleotide
gagccagccacagggccccc

SEQ ID NO: 1254 - RNA, 20 nt, Artificial Sequence
  Description of Artificial Sequence: Synthetic oligonucleotide
ggaagcagaaggugcuugcg

SEQ ID NO: 1255 - RNA, 20 nt, Artificial Sequence
  Description of Artificial Sequence: Synthetic oligonucleotide
ggcugcagccggggacacug

SEQ ID NO: 1256 - RNA, 20 nt, Artificial Sequence
  Description of Artificial Sequence: Synthetic oligonucleotide
cugccaaauuccagccuccu

SEQ ID NO: 1257 - RNA, 20 nt, Artificial Sequence
  Description of Artificial Sequence: Synthetic oligonucleotide
ggcgggccaagacuucuccc

SEQ ID NO: 1258 - RNA, 20 nt, Artificial Sequence
  Description of Artificial Sequence: Synthetic oligonucleotide
agacucagaggugagaggag

SEQ ID NO: 1259 - RNA, 20 nt, Artificial Sequence
  Description of Artificial Sequence: Synthetic oligonucleotide
agccuaggaggcaaagagca

SEQ ID NO: 1260 - RNA, 20 nt, Artificial Sequence
  Description of Artificial Sequence: Synthetic oligonucleotide
cccccaggcuuuccccaaac

SEQ ID NO: 1261 - RNA, 20 nt, Artificial Sequence
  Description of Artificial Sequence: Synthetic oligonucleotide
ucacuccagaugcugcaggg

SEQ ID NO: 1262 - RNA, 20 nt, Artificial Sequence
  Description of Artificial Sequence: Synthetic oligonucleotide
aggcugcagguggaaucaga

SEQ ID NO: 1263 - RNA, 20 nt, Artificial Sequence
  Description of Artificial Sequence: Synthetic oligonucleotide
cuucccccagcugaaguccu

SEQ ID NO: 1264 - RNA, 20 nt, Artificial Sequence
  Description of Artificial Sequence: Synthetic oligonucleotide
cacucacuugaggguuucca

SEQ ID NO: 1265 - RNA, 20 nt, Artificial Sequence
  Description of Artificial Sequence: Synthetic oligonucleotide
cagacugcggggacacagug

SEQ ID NO: 1266 - RNA, 20 nt, Artificial Sequence
  Description of Artificial Sequence: Synthetic oligonucleotide
ccacucaccuuagccugagc

SEQ ID NO: 1267 - RNA, 20 nt, Artificial Sequence
  Description of Artificial Sequence: Synthetic oligonucleotide
cacucaccuuagccugagca

SEQ ID NO: 1268 - RNA, 20 nt, Artificial Sequence
  Description of Artificial Sequence: Synthetic oligonucleotide
guacaagcugucggaaacag

SEQ ID NO: 1269 - RNA, 20 nt, Artificial Sequence
  Description of Artificial Sequence: Synthetic oligonucleotide
acacucacuccaucacccgg

SEQ ID NO: 1270 - RNA, 20 nt, Artificial Sequence
  Description of Artificial Sequence: Synthetic oligonucleotide
cacucacuccaucacccgga

SEQ ID NO: 1271 - RNA, 20 nt, Artificial Sequence
  Description of Artificial Sequence: Synthetic oligonucleotide
cguccaguacaacaaguuca

SEQ ID NO: 1272 - RNA, 20 nt, Artificial Sequence
  Description of Artificial Sequence: Synthetic oligonucleotide
ccacauccugcaagggggga

SEQ ID NO: 1273 - RNA, 20 nt, Artificial Sequence
  Description of Artificial Sequence: Synthetic oligonucleotide
cacauccugcaaggggggau

SEQ ID NO: 1274 - RNA, 20 nt, Artificial Sequence
  Description of Artificial Sequence: Synthetic oligonucleotide
ugggcguccacauccugcaa

SEQ ID NO: 1275 - RNA, 20 nt, Artificial Sequence
  Description of Artificial Sequence: Synthetic oligonucleotide
gggcguccacauccugcaag

SEQ ID NO: 1276 - RNA, 20 nt, Artificial Sequence
  Description of Artificial Sequence: Synthetic oligonucleotide
ggcguccacauccugcaagg

SEQ ID NO: 1277 - RNA, 20 nt, Artificial Sequence
  Description of Artificial Sequence: Synthetic oligonucleotide
gcguccacauccugcaaggg

SEQ ID NO: 1278 - RNA, 20 nt, Artificial Sequence
  Description of Artificial Sequence: Synthetic oligonucleotide
gcccaagguaagagcuuccc

SEQ ID NO: 1279 - RNA, 20 nt, Artificial Sequence
  Description of Artificial Sequence: Synthetic oligonucleotide
gcucuuaccuugggcagcca

SEQ ID NO: 1280 - RNA, 20 nt, Artificial Sequence
  Description of Artificial Sequence: Synthetic oligonucleotide
agcucuuaccuugggcagcc

SEQ ID NO: 1281 - RNA, 20 nt, Artificial Sequence
  Description of Artificial Sequence: Synthetic oligonucleotide
ugcaccucuggggaggaccu

SEQ ID NO: 1282 - RNA, 20 nt, Artificial Sequence
  Description of Artificial Sequence: Synthetic oligonucleotide
cugcaccucuggggaggacc

SEQ ID NO: 1283 - RNA, 20 nt, Artificial Sequence
  Description of Artificial Sequence: Synthetic oligonucleotide
cgccugcagcugucggacac

SEQ ID NO: 1284 - RNA, 20 nt, Artificial Sequence
  Description of Artificial Sequence: Synthetic oligonucleotide
caccugccaggccaucacgg

SEQ ID NO: 1285 - RNA, 20 nt, Artificial Sequence
  Description of Artificial Sequence: Synthetic oligonucleotide
cccuaccugucaccaggacc

SEQ ID NO: 1286 - RNA, 20 nt, Artificial Sequence
  Description of Artificial Sequence: Synthetic oligonucleotide
ccuaccugucaccaggacca

SEQ ID NO: 1287 - RNA, 20 nt, Artificial Sequence
  Description of Artificial Sequence: Synthetic oligonucleotide
ccucugagaaggaaaaaaga

SEQ ID NO: 1288 - RNA, 20 nt, Artificial Sequence
  Description of Artificial Sequence: Synthetic oligonucleotide
cagaggaacagucccaagga

SEQ ID NO: 1289 - RNA, 20 nt, Artificial Sequence
  Description of Artificial Sequence: Synthetic oligonucleotide
cacucaccugcccacagcag

SEQ ID NO: 1290 - RNA, 20 nt, Artificial Sequence
  Description of Artificial Sequence: Synthetic oligonucleotide
ccacucaccugcccacagca

SEQ ID NO: 1291 - RNA, 20 nt, Artificial Sequence
  Description of Artificial Sequence: Synthetic oligonucleotide
gccacucaccugcccacagc

SEQ ID NO: 1292 - RNA, 20 nt, Artificial Sequence
  Description of Artificial Sequence: Synthetic oligonucleotide
agggccccuguggggaaacg

SEQ ID NO: 1293 - RNA, 20 nt, Artificial Sequence
  Description of Artificial Sequence: Synthetic oligonucleotide
gggccccuguggggaaacga

SEQ ID NO: 1294 - RNA, 20 nt, Artificial Sequence
  Description of Artificial Sequence: Synthetic oligonucleotide
gcaagugcaggagucaguga

SEQ ID NO: 1295 - RNA, 20 nt, Artificial Sequence
  Description of Artificial Sequence: Synthetic oligonucleotide
cggaaccaguaaccaugaac

SEQ ID NO: 1296 - RNA, 20 nt, Artificial Sequence
  Description of Artificial Sequence: Synthetic oligonucleotide
ggaaccaguaaccaugaacu

SEQ ID NO: 1297 - RNA, 20 nt, Artificial Sequence
  Description of Artificial Sequence: Synthetic oligonucleotide
gaaccaguaaccaugaacug

SEQ ID NO: 1298 - RNA, 20 nt, Artificial Sequence
  Description of Artificial Sequence: Synthetic oligonucleotide
gcuagaucaagaaguacagg

SEQ ID NO: 1299 - RNA, 20 nt, Artificial Sequence
  Description of Artificial Sequence: Synthetic oligonucleotide
agaaguacaggaggagacuc

SEQ ID NO: 1300 - RNA, 20 nt, Artificial Sequence
  Description of Artificial Sequence: Synthetic oligonucleotide
caagucuagugaggagaaag

SEQ ID NO: 1301 - RNA, 20 nt, Artificial Sequence
  Description of Artificial Sequence: Synthetic oligonucleotide
aagucuagugaggagaaaga

SEQ ID NO: 1302 - RNA, 20 nt, Artificial Sequence
  Description of Artificial Sequence: Synthetic oligonucleotide
agucuagugaggagaaagag

SEQ ID NO: 1303 - DNA, 20 bp, Artificial Sequence
  Description of Artificial Sequence: Synthetic oligonucleotide
acaggcccaggacacagagc

SEQ ID NO: 1304 - RNA, 20 nt, Artificial Sequence
  Description of Artificial Sequence: Synthetic oligonucleotide
accugucaggugaaguucgc

SEQ ID NO: 1305 - RNA, 20 nt, Artificial Sequence
  Description of Artificial Sequence: Synthetic oligonucleotide
acuuacaggugacguugagc

SEQ ID NO: 1306 - RNA, 20 nt, Artificial Sequence
  Description of Artificial Sequence: Synthetic oligonucleotide
aacaucuaggagaggaagag

SEQ ID NO: 1307 - RNA, 20 nt, Artificial Sequence
  Description of Artificial Sequence: Synthetic oligonucleotide
guuccacagaacccaacaac

SEQ ID NO: 1308 - RNA, 20 nt, Artificial Sequence
  Description of Artificial Sequence: Synthetic oligonucleotide
uuccuaccugagccaucucc

SEQ ID NO: 1309 - RNA, 20 nt, Artificial Sequence
  Description of Artificial Sequence: Synthetic oligonucleotide
augcucacaugaagaagaug

SEQ ID NO: 1310 - DNA, 20 bp, Artificial Sequence
  Description of Artificial Sequence: Synthetic oligonucleotide
gggaaacaagagaccagagc

SEQ ID NO: 1311 - RNA, 20 nt, Artificial Sequence
  Description of Artificial Sequence: Synthetic oligonucleotide
ucacucugaugggagacacc

SEQ ID NO: 1312 - RNA, 20 nt, Artificial Sequence
  Description of Artificial Sequence: Synthetic oligonucleotide
cacucugaugggagacacca

SEQ ID NO: 1313 - RNA, 20 nt, Artificial Sequence
  Description of Artificial Sequence: Synthetic oligonucleotide
uuucuuauggagaggaaaga

SEQ ID NO: 1314 - RNA, 20 nt, Artificial Sequence
  Description of Artificial Sequence: Synthetic oligonucleotide
guacagguaagagcaacgcc

SEQ ID NO: 1315 - RNA, 20 nt, Artificial Sequence
  Description of Artificial Sequence: Synthetic oligonucleotide
cucuuaccuguaccauaacc

SEQ ID NO: 1316 - RNA, 20 nt, Artificial Sequence
  Description of Artificial Sequence: Synthetic oligonucleotide
uuaccuguaccauaaccagg

SEQ ID NO: 1317 - RNA, 20 nt, Artificial Sequence
  Description of Artificial Sequence: Synthetic oligonucleotide
uguaucuguaggaggagaag

SEQ ID NO: 1318 - RNA, 20 nt, Artificial Sequence
  Description of Artificial Sequence: Synthetic oligonucleotide
guaucuguaggaggagaagu

SEQ ID NO: 1319 - RNA, 20 nt, Artificial Sequence
  Description of Artificial Sequence: Synthetic oligonucleotide
cagauacaaacuggacucuc

SEQ ID NO: 1320 - RNA, 20 nt, Artificial Sequence
  Description of Artificial Sequence: Synthetic oligonucleotide
ucuuaccuuccuucguuugc

SEQ ID NO: 1321 - RNA, 20 nt, Artificial Sequence
  Description of Artificial Sequence: Synthetic oligonucleotide
uuuggaucuaaaacggugac

SEQ ID NO: 1322 - RNA, 20 nt, Artificial Sequence
  Description of Artificial Sequence: Synthetic oligonucleotide
gaucuaaaacggugacaggu

SEQ ID NO: 1323 - RNA, 20 nt, Artificial Sequence
  Description of Artificial Sequence: Synthetic oligonucleotide
aaaggcucagcaguugaccu

SEQ ID NO: 1324 - RNA, 20 nt, Artificial Sequence
  Description of Artificial Sequence: Synthetic oligonucleotide
auuuaccggcauagaauagu

SEQ ID NO: 1325 - RNA, 20 nt, Artificial Sequence
  Description of Artificial Sequence: Synthetic oligonucleotide
ucacugccuaagagagacau

SEQ ID NO: 1326 - RNA, 20 nt, Artificial Sequence
  Description of Artificial Sequence: Synthetic oligonucleotide
aggauccacguggagaaugg

SEQ ID NO: 1327 - RNA, 20 nt, Artificial Sequence
  Description of Artificial Sequence: Synthetic oligonucleotide
ggauccacguggagaauggu

SEQ ID NO: 1328 - RNA, 20 nt, Artificial Sequence
  Description of Artificial Sequence: Synthetic oligonucleotide
ucucacuguucucagggaag

SEQ ID NO: 1329 - RNA, 20 nt, Artificial Sequence
  Description of Artificial Sequence: Synthetic oligonucleotide
ccugcccaaggcuucccacc

SEQ ID NO: 1330 - RNA, 20 nt, Artificial Sequence
  Description of Artificial Sequence: Synthetic oligonucleotide
cugcccaaggcuucccaccu

SEQ ID NO: 1331 - RNA, 20 nt, Artificial Sequence
  Description of Artificial Sequence: Synthetic oligonucleotide
gccugcugcgguaagcggua

SEQ ID NO: 1332 - RNA, 20 nt, Artificial Sequence
  Description of Artificial Sequence: Synthetic oligonucleotide
gaugcucagggaacacguau

SEQ ID NO: 1333 - RNA, 20 nt, Artificial Sequence
  Description of Artificial Sequence: Synthetic oligonucleotide
uucucaaaguucccacaucc

SEQ ID NO: 1334 - RNA, 20 nt, Artificial Sequence
  Description of Artificial Sequence: Synthetic oligonucleotide
ucacagauuggugaguagcc

SEQ ID NO: 1335 - RNA, 20 nt, Artificial Sequence
  Description of Artificial Sequence: Synthetic oligonucleotide
cucaccuguucugugauuac

SEQ ID NO: 1336 - RNA, 20 nt, Artificial Sequence
  Description of Artificial Sequence: Synthetic oligonucleotide
uccuuccagcuacucaaucc

SEQ ID NO: 1337 - RNA, 20 nt, Artificial Sequence
  Description of Artificial Sequence: Synthetic oligonucleotide
cacaguacaaauaagagccc

SEQ ID NO: 1338 - RNA, 20 nt, Artificial Sequence
  Description of Artificial Sequence: Synthetic oligonucleotide
ccccccagcgcuucggugag

SEQ ID NO: 1339 - RNA, 20 nt, Artificial Sequence
  Description of Artificial Sequence: Synthetic oligonucleotide
cccccagcgcuucggugagu

SEQ ID NO: 1340 - RNA, 20 nt, Artificial Sequence
  Description of Artificial Sequence: Synthetic oligonucleotide
ccacucaccgaagcgcuggg

SEQ ID NO: 1341 - RNA, 20 nt, Artificial Sequence
  Description of Artificial Sequence: Synthetic oligonucleotide
uaccucggaggaaagagaaa

SEQ ID NO: 1342 - RNA, 20 nt, Artificial Sequence
  Description of Artificial Sequence: Synthetic oligonucleotide
cagcuuccaaaacgacaagc

SEQ ID NO: 1343 - RNA, 20 nt, Artificial Sequence
  Description of Artificial Sequence: Synthetic oligonucleotide
aacauaccagcuugucguuu

SEQ ID NO: 1344 - RNA, 20 nt, Artificial Sequence
  Description of Artificial Sequence: Synthetic oligonucleotide
agaccaccugcagagacgag

SEQ ID NO: 1345 - RNA, 20 nt, Artificial Sequence
  Description of Artificial Sequence: Synthetic oligonucleotide
ccaccugcagagacgagagg

SEQ ID NO: 1346 - DNA, 20 bp, Artificial Sequence
  Description of Artificial Sequence: Synthetic oligonucleotide
ccacacccaaaaggccacac

SEQ ID NO: 1347 - RNA, 20 nt, Artificial Sequence
  Description of Artificial Sequence: Synthetic oligonucleotide
cccaccagcucagcuccacg

SEQ ID NO: 1348 - RNA, 20 nt, Artificial Sequence
  Description of Artificial Sequence: Synthetic oligonucleotide
cgcugucaaguccaguucua

SEQ ID NO: 1349 - RNA, 20 nt, Artificial Sequence
  Description of Artificial Sequence: Synthetic oligonucleotide
gcugucaaguccaguucuac

SEQ ID NO: 1350 - RNA, 20 nt, Artificial Sequence
  Description of Artificial Sequence: Synthetic oligonucleotide
cacccagaucgucagcgccg

SEQ ID NO: 1351 - RNA, 20 nt, Artificial Sequence
  Description of Artificial Sequence: Synthetic oligonucleotide
ccacucaccugcucuacccc

SEQ ID NO: 1352 - RNA, 20 nt, Artificial Sequence
  Description of Artificial Sequence: Synthetic oligonucleotide
ccacagucugaaagaaagca

SEQ ID NO: 1353 - RNA, 20 nt, Artificial Sequence
  Description of Artificial Sequence: Synthetic oligonucleotide
gacacuguuggcacggagga

SEQ ID NO: 1354 - RNA, 20 nt, Artificial Sequence
  Description of Artificial Sequence: Synthetic oligonucleotide
uuaccauggccaucaacaca

SEQ ID NO: 1355 - DNA, 20 bp, Artificial Sequence
  Description of Artificial Sequence: Synthetic oligonucleotide
ccacacccaaaaggccacac

SEQ ID NO: 1356 - RNA, 20 nt, Artificial Sequence
  Description of Artificial Sequence: Synthetic oligonucleotide
cccaccagcucagcuccacg

SEQ ID NO: 1357 - RNA, 20 nt, Artificial Sequence
  Description of Artificial Sequence: Synthetic oligonucleotide
cgcugucaaguccaguucua

SEQ ID NO: 1358 - RNA, 20 nt, Artificial Sequence
  Description of Artificial Sequence: Synthetic oligonucleotide
gcugucaaguccaguucuac

SEQ ID NO: 1359 - RNA, 20 nt, Artificial Sequence
  Description of Artificial Sequence: Synthetic oligonucleotide
cacccagaucgucagcgccg

SEQ ID NO: 1360 - RNA, 20 nt, Artificial Sequence
  Description of Artificial Sequence: Synthetic oligonucleotide
ccacagucugaaagaaaaca

SEQ ID NO: 1361 - RNA, 20 nt, Artificial Sequence
  Description of Artificial Sequence: Synthetic oligonucleotide
cacagucugaaagaaaacag

SEQ ID NO: 1362 - RNA, 20 nt, Artificial Sequence
  Description of Artificial Sequence: Synthetic oligonucleotide
uuaccauggccaucagcacg

SEQ ID NO: 1363 - RNA, 20 nt, Artificial Sequence
  Description of Artificial Sequence: Synthetic oligonucleotide
ccacucaccugcucuacccc

SEQ ID NO: 1364 - RNA, 20 nt, Artificial Sequence
  Description of Artificial Sequence: Synthetic oligonucleotide
ucugcguucagggguaagcg

SEQ ID NO: 1365 - RNA, 20 nt, Artificial Sequence
  Description of Artificial Sequence: Synthetic oligonucleotide
gcgcuuaccccugaacgcag

SEQ ID NO: 1366 - RNA, 20 nt, Artificial Sequence
  Description of Artificial Sequence: Synthetic oligonucleotide
gacugggcagcggccccugu

SEQ ID NO: 1367 - RNA, 20 nt, Artificial Sequence
  Description of Artificial Sequence: Synthetic oligonucleotide
ggacugggcagcggccccug

SEQ ID NO: 1368 - RNA, 20 nt, Artificial Sequence
  Description of Artificial Sequence: Synthetic oligonucleotide
gucaugcagcccuugccugc

SEQ ID NO: 1369 - RNA, 20 nt, Artificial Sequence
  Description of Artificial Sequence: Synthetic oligonucleotide
ucaugcagcccuugccugcu

SEQ ID NO: 1370 - RNA, 20 nt, Artificial Sequence
  Description of Artificial Sequence: Synthetic oligonucleotide
caugcagcccuugccugcug

SEQ ID NO: 1371 - RNA, 20 nt, Artificial Sequence
  Description of Artificial Sequence: Synthetic oligonucleotide
cucaccagauucccgaaggu

SEQ ID NO: 1372 - RNA, 20 nt, Artificial Sequence
  Description of Artificial Sequence: Synthetic oligonucleotide
cagacucaccagauucccga

SEQ ID NO: 1373 - RNA, 20 nt, Artificial Sequence
  Description of Artificial Sequence: Synthetic oligonucleotide
agccuaggcaagugcagagg

SEQ ID NO: 1374 - RNA, 20 nt, Artificial Sequence
  Description of Artificial Sequence: Synthetic oligonucleotide
cagccuaggcaagugcagag

SEQ ID NO: 1375 - RNA, 20 nt, Artificial Sequence
  Description of Artificial Sequence: Synthetic oligonucleotide
accagccuaggcaagugcag

SEQ ID NO: 1376 - RNA, 20 nt, Artificial Sequence
  Description of Artificial Sequence: Synthetic oligonucleotide
uggaaccccaauaccagccu

SEQ ID NO: 1377 - RNA, 20 nt, Artificial Sequence
  Description of Artificial Sequence: Synthetic oligonucleotide
caccugcagaagaugccaga

SEQ ID NO: 1378 - RNA, 20 nt, Artificial Sequence
  Description of Artificial Sequence: Synthetic oligonucleotide
cgcucaccugcaccagccuc

SEQ ID NO: 1379 - RNA, 20 nt, Artificial Sequence
  Description of Artificial Sequence: Synthetic oligonucleotide
cuuccuggcaagacacaaga

SEQ ID NO: 1380 - RNA, 20 nt, Artificial Sequence
  Description of Artificial Sequence: Synthetic oligonucleotide
aauucagggagccauugaaa

SEQ ID NO: 1381 - RNA, 20 nt, Artificial Sequence
  Description of Artificial Sequence: Synthetic oligonucleotide
cuacugaccugccuuuucaa

SEQ ID NO: 1382 - RNA, 20 nt, Artificial Sequence
  Description of Artificial Sequence: Synthetic oligonucleotide
gccucucaaagucuuaugug

SEQ ID NO: 1383 - RNA, 20 nt, Artificial Sequence
  Description of Artificial Sequence: Synthetic oligonucleotide
uucccaugcugcuuuacuuc

SEQ ID NO: 1384 - RNA, 20 nt, Artificial Sequence
  Description of Artificial Sequence: Synthetic oligonucleotide
uuuaggucaaccagauguag

SEQ ID NO: 1385 - RNA, 20 nt, Artificial Sequence
  Description of Artificial Sequence: Synthetic oligonucleotide
ugugccugaaagcaaaaaug

SEQ ID NO: 1386 - RNA, 20 nt, Artificial Sequence
  Description of Artificial Sequence: Synthetic oligonucleotide
uuaccuacuauucuugccag

SEQ ID NO: 1387 - RNA, 20 nt, Artificial Sequence
  Description of Artificial Sequence: Synthetic oligonucleotide
aaaugcuguuuaaaaaaagg

SEQ ID NO: 1388 - RNA, 20 nt, Artificial Sequence
  Description of Artificial Sequence: Synthetic oligonucleotide
ccccaaaaagugaauaucaa

SEQ ID NO: 1389 - RNA, 20 nt, Artificial Sequence
  Description of Artificial Sequence: Synthetic oligonucleotide
guccagaauuuccagaagua

SEQ ID NO: 1390 - RNA, 20 nt, Artificial Sequence
  Description of Artificial Sequence: Synthetic oligonucleotide
ucccuggaggggugggggag

SEQ ID NO: 1391 - RNA, 20 nt, Artificial Sequence
  Description of Artificial Sequence: Synthetic oligonucleotide
ucacuucaacaggacuccua

SEQ ID NO: 1392 - RNA, 20 nt, Artificial Sequence
  Description of Artificial Sequence: Synthetic oligonucleotide
ccuuacacucaaaggcaaag

SEQ ID NO: 1393 - RNA, 20 nt, Artificial Sequence
  Description of Artificial Sequence: Synthetic oligonucleotide
auggcugcagggagaggaag

SEQ ID NO: 1394 - RNA, 20 nt, Artificial Sequence
  Description of Artificial Sequence: Synthetic oligonucleotide
ggagcgccaggggaugcugg

SEQ ID NO: 1395 - RNA, 20 nt, Artificial Sequence
  Description of Artificial Sequence: Synthetic oligonucleotide
ucacgucccaugcagccaca

SEQ ID NO: 1396 - RNA, 20 nt, Artificial Sequence
  Description of Artificial Sequence: Synthetic oligonucleotide
uggacgucugguggggagua

SEQ ID NO: 1397 - RNA, 20 nt, Artificial Sequence
  Description of Artificial Sequence: Synthetic oligonucleotide
acucacauugaugaggaaga

SEQ ID NO: 1398 - RNA, 20 nt, Artificial Sequence
  Description of Artificial Sequence: Synthetic oligonucleotide
cagcaucugagaaaggcaga

SEQ ID NO: 1399 - RNA, 20 nt, Artificial Sequence
  Description of Artificial Sequence: Synthetic oligonucleotide
aauccaacaccucagcgaug

SEQ ID NO: 1400 - RNA, 20 nt, Artificial Sequence
  Description of Artificial Sequence: Synthetic oligonucleotide
auccaacaccucagcgaugu

SEQ ID NO: 1401 - RNA, 20 nt, Artificial Sequence
  Description of Artificial Sequence: Synthetic oligonucleotide
cgcggcgcaguacccgcugc

SEQ ID NO: 1402 - RNA, 20 nt, Artificial Sequence
  Description of Artificial Sequence: Synthetic oligonucleotide
cacucaccguggugggucgg

SEQ ID NO: 1403 - RNA, 20 nt, Artificial Sequence
  Description of Artificial Sequence: Synthetic oligonucleotide
acucaccguggugggucgga

SEQ ID NO: 1404 - RNA, 20 nt, Artificial Sequence
  Description of Artificial Sequence: Synthetic oligonucleotide
uggcucccuguggggcaacg

SEQ ID NO: 1405 - RNA, 20 nt, Artificial Sequence
  Description of Artificial Sequence: Synthetic oligonucleotide
gauuccagggggaggcggug

SEQ ID NO: 1406 - RNA, 20 nt, Artificial Sequence
  Description of Artificial Sequence: Synthetic oligonucleotide
gcuccuaccugugcuggacc

SEQ ID NO: 1407 - RNA, 20 nt, Artificial Sequence
  Description of Artificial Sequence: Synthetic oligonucleotide
ucgccgccacaguggggucg

SEQ ID NO: 1408 - RNA, 20 nt, Artificial Sequence
  Description of Artificial Sequence: Synthetic oligonucleotide
cagacugagaguggggagag

SEQ ID NO: 1409 - RNA, 20 nt, Artificial Sequence
  Description of Artificial Sequence: Synthetic oligonucleotide
ccuccuccagagugugguug

SEQ ID NO: 1410 - RNA, 20 nt, Artificial Sequence
  Description of Artificial Sequence: Synthetic oligonucleotide
agccaucccagggagagagc

SEQ ID NO: 1411 - RNA, 20 nt, Artificial Sequence
  Description of Artificial Sequence: Synthetic oligonucleotide
gccaucccagggagagagcu

SEQ ID NO: 1412 - RNA, 20 nt, Artificial Sequence
  Description of Artificial Sequence: Synthetic oligonucleotide
ccaucccagggagagagcug

SEQ ID NO: 1413 - RNA, 20 nt, Artificial Sequence
  Description of Artificial Sequence: Synthetic oligonucleotide
cucacaggccacccaccagc

SEQ ID NO: 1414 - RNA, 20 nt, Artificial Sequence
  Description of Artificial Sequence: Synthetic oligonucleotide
ccgcuuccagaagugccugg

SEQ ID NO: 1415 - RNA, 20 nt, Artificial Sequence
  Description of Artificial Sequence: Synthetic oligonucleotide
cuuccagaagugccuggcgg

SEQ ID NO: 1416 - RNA, 20 nt, Artificial Sequence
  Description of Artificial Sequence: Synthetic oligonucleotide
acaacugcaaaggaaugggu

SEQ ID NO: 1417 - RNA, 20 nt, Artificial Sequence
  Description of Artificial Sequence: Synthetic oligonucleotide
caacugcaaaggaaugggua

SEQ ID NO: 1418 - RNA, 20 nt, Artificial Sequence
  Description of Artificial Sequence: Synthetic oligonucleotide
gaacuaggaagacgguccag

SEQ ID NO: 1419 - RNA, 20 nt, Artificial Sequence
  Description of Artificial Sequence: Synthetic oligonucleotide
ggcugaccaggaccuguugc

SEQ ID NO: 1420 - RNA, 20 nt, Artificial Sequence
  Description of Artificial Sequence: Synthetic oligonucleotide
cucaccuguacgccaggcgg

SEQ ID NO: 1421 - RNA, 20 nt, Artificial Sequence
  Description of Artificial Sequence: Synthetic oligonucleotide
gcucucaccuguacgccagg

SEQ ID NO: 1422 - RNA, 20 nt, Artificial Sequence
  Description of Artificial Sequence: Synthetic oligonucleotide
cuuagaccuggcaggcagau

SEQ ID NO: 1423 - RNA, 20 nt, Artificial Sequence
  Description of Artificial Sequence: Synthetic oligonucleotide
caauccaguccccgaagcca

SEQ ID NO: 1424 - RNA, 20 nt, Artificial Sequence
  Description of Artificial Sequence: Synthetic oligonucleotide
aauccaguccccgaagccac

SEQ ID NO: 1425 - RNA, 20 nt, Artificial Sequence
  Description of Artificial Sequence: Synthetic oligonucleotide
acucaccggugaugaggaca

SEQ ID NO: 1426 - RNA, 20 nt, Artificial Sequence
  Description of Artificial Sequence: Synthetic oligonucleotide
cucaccggugaugaggacaa

SEQ ID NO: 1427 - RNA, 20 nt, Artificial Sequence
  Description of Artificial Sequence: Synthetic oligonucleotide
ccggucugcgggaaggguac

SEQ ID NO: 1428 - RNA, 20 nt, Artificial Sequence
  Description of Artificial Sequence: Synthetic oligonucleotide
ugggcugcaggagccgcggc

SEQ ID NO: 1429 - RNA, 20 nt, Artificial Sequence
  Description of Artificial Sequence: Synthetic oligonucleotide
uuguaccaaaugccccuguc

SEQ ID NO: 1430 - RNA, 20 nt, Artificial Sequence
  Description of Artificial Sequence: Synthetic oligonucleotide
cggacagcaguccuccauua

SEQ ID NO: 1431 - RNA, 20 nt, Artificial Sequence
  Description of Artificial Sequence: Synthetic oligonucleotide
aggugcagcacagccccaug

SEQ ID NO: 1432 - RNA, 20 nt, Artificial Sequence
  Description of Artificial Sequence: Synthetic oligonucleotide
ggugcagcacagccccaugu

SEQ ID NO: 1433 - RNA, 20 nt, Artificial Sequence
  Description of Artificial Sequence: Synthetic oligonucleotide
aguugccagaugcgcuucga

SEQ ID NO: 1434 - RNA, 20 nt, Artificial Sequence
  Description of Artificial Sequence: Synthetic oligonucleotide
guugccagaugcgcuucgac

SEQ ID NO: 1435 - RNA, 20 nt, Artificial Sequence
  Description of Artificial Sequence: Synthetic oligonucleotide
gucucagcugcucgacacgc

SEQ ID NO: 1436 - RNA, 20 nt, Artificial Sequence
  Description of Artificial Sequence: Synthetic oligonucleotide
uucuuacccuggaauagucc

SEQ ID NO: 1437 - RNA, 20 nt, Artificial Sequence
  Description of Artificial Sequence: Synthetic oligonucleotide
auuaccuguaugcuaaucga

SEQ ID NO: 1438 - RNA, 20 nt, Artificial Sequence
  Description of Artificial Sequence: Synthetic oligonucleotide
uugcaaugcguucguggcuu

SEQ ID NO: 1439 - RNA, 20 nt, Artificial Sequence
  Description of Artificial Sequence: Synthetic oligonucleotide
acugaccugugaccauagcc

SEQ ID NO: 1440 - RNA, 20 nt, Artificial Sequence
  Description of Artificial Sequence: Synthetic oligonucleotide
uaucugcagggacagagaaa

SEQ ID NO: 1441 - RNA, 20 nt, Artificial Sequence
  Description of Artificial Sequence: Synthetic oligonucleotide
ugcggcgcagacauacagcu

SEQ ID NO: 1442 - RNA, 20 nt, Artificial Sequence
  Description of Artificial Sequence: Synthetic oligonucleotide
ccccgcaggcgggggcguua

SEQ ID NO: 1443 - RNA, 20 nt, Artificial Sequence
  Description of Artificial Sequence: Synthetic oligonucleotide
uuucagaagugucucagugu

SEQ ID NO: 1444 - RNA, 20 nt, Artificial Sequence
  Description of Artificial Sequence: Synthetic oligonucleotide
auuaccugauggaaagucug

SEQ ID NO: 1445 - RNA, 20 nt, Artificial Sequence
  Description of Artificial Sequence: Synthetic oligonucleotide
cuucagugccuucguggauu

SEQ ID NO: 1446 - RNA, 20 nt, Artificial Sequence
  Description of Artificial Sequence: Synthetic oligonucleotide
uuucugcagagggauagaga

SEQ ID NO: 1447 - RNA, 20 nt, Artificial Sequence
  Description of Artificial Sequence: Synthetic oligonucleotide
agaccaccagaguaagggac

SEQ ID NO: 1448 - RNA, 20 nt, Artificial Sequence
  Description of Artificial Sequence: Synthetic oligonucleotide
acuugcagcccucggccaaa

SEQ ID NO: 1449 - RNA, 20 nt, Artificial Sequence
  Description of Artificial Sequence: Synthetic oligonucleotide
agggcucaccagagguagga

SEQ ID NO: 1450 - RNA, 20 nt, Artificial Sequence
  Description of Artificial Sequence: Synthetic oligonucleotide
uucaccugcccaaggaaaaa

SEQ ID NO: 1451 - RNA, 20 nt, Artificial Sequence
  Description of Artificial Sequence: Synthetic oligonucleotide
cuaagccuagaaaaucaguu

SEQ ID NO: 1452 - RNA, 20 nt, Artificial Sequence
  Description of Artificial Sequence: Synthetic oligonucleotide
acaucuagaaaaaaaaauac

SEQ ID NO: 1453 - RNA, 20 nt, Artificial Sequence
  Description of Artificial Sequence: Synthetic oligonucleotide
auuaccuuccucuuugcacu

SEQ ID NO: 1454 - RNA, 20 nt, Artificial Sequence
  Description of Artificial Sequence: Synthetic oligonucleotide
gauccuguagguuggaacau

SEQ ID NO: 1455 - RNA, 20 nt, Artificial Sequence
  Description of Artificial Sequence: Synthetic oligonucleotide
aagccaccccaaguuagauc

SEQ ID NO: 1456 - RNA, 20 nt, Artificial Sequence
  Description of Artificial Sequence: Synthetic oligonucleotide
aacuuaccccaaacaauuag

SEQ ID NO: 1457 - RNA, 20 nt, Artificial Sequence
  Description of Artificial Sequence: Synthetic oligonucleotide
auaccuacaggauuuaaagu

SEQ ID NO: 1458 - RNA, 20 nt, Artificial Sequence
  Description of Artificial Sequence: Synthetic oligonucleotide
guuuccuagaaagcaaaaaa

SEQ ID NO: 1459 - RNA, 20 nt, Artificial Sequence
  Description of Artificial Sequence: Synthetic oligonucleotide
aaguucaacugcuucguaau

SEQ ID NO: 1460 - RNA, 20 nt, Artificial Sequence
  Description of Artificial Sequence: Synthetic oligonucleotide
aauucagacuaucauccuca

SEQ ID NO: 1461 - RNA, 20 nt, Artificial Sequence
  Description of Artificial Sequence: Synthetic oligonucleotide
gcuugcagcugugggacacc

SEQ ID NO: 1462 - RNA, 20 nt, Artificial Sequence
  Description of Artificial Sequence: Synthetic oligonucleotide
gaccacucaaccagugccca

SEQ ID NO: 1463 - RNA, 20 nt, Artificial Sequence
  Description of Artificial Sequence: Synthetic oligonucleotide
ggaggcacagaccacuccac

SEQ ID NO: 1464 - RNA, 20 nt, Artificial Sequence
  Description of Artificial Sequence: Synthetic oligonucleotide
ggcacagacaacucgacuga

SEQ ID NO: 1465 - RNA, 20 nt, Artificial Sequence
  Description of Artificial Sequence: Synthetic oligonucleotide
ggaggcacagaccacuccac

SEQ ID NO: 1466 - RNA, 20 nt, Artificial Sequence
  Description of Artificial Sequence: Synthetic oligonucleotide
gcacagaccacucaacccac

SEQ ID NO: 1467 - RNA, 20 nt, Artificial Sequence
  Description of Artificial Sequence: Synthetic oligonucleotide
gaccacucaacccacaggcc

SEQ ID NO: 1468 - RNA, 20 nt, Artificial Sequence
  Description of Artificial Sequence: Synthetic oligonucleotide
gaccacucaaaccacagcca

SEQ ID NO: 1469 - RNA, 20 nt, Artificial Sequence
  Description of Artificial Sequence: Synthetic oligonucleotide
gaccacucaacccacagcca

SEQ ID NO: 1470 - RNA, 20 nt, Artificial Sequence
  Description of Artificial Sequence: Synthetic oligonucleotide
ggaggcacagaccacuccac

SEQ ID NO: 1471 - RNA, 20 nt, Artificial Sequence
  Description of Artificial Sequence: Synthetic oligonucleotide
gaccacucaaccagcagcca

SEQ ID NO: 1472 - RNA, 20 nt, Artificial Sequence
  Description of Artificial Sequence: Synthetic oligonucleotide
uucguaucuguaaaaccaag

SEQ ID NO: 1473 - RNA, 20 nt, Artificial Sequence
  Description of Artificial Sequence: Synthetic oligonucleotide
ccuaccugucaccaggacca

SEQ ID NO: 1474 - RNA, 20 nt, Artificial Sequence
  Description of Artificial Sequence: Synthetic oligonucleotide
cucuuaccuguaccauaacc

SEQ ID NO: 1475 - RNA, 20 nt, Artificial Sequence
  Description of Artificial Sequence: Synthetic oligonucleotide
caccuaccuaagaaccaucc

SEQ ID NO: 1476 - RNA, 20 nt, Artificial Sequence
  Description of Artificial Sequence: Synthetic oligonucleotide
acucacgcuggauagccucc

SEQ ID NO: 1477 - RNA, 20 nt, Artificial Sequence
  Description of Artificial Sequence: Synthetic oligonucleotide
acucacccagcauccccagc

SEQ ID NO: 1478 - RNA, 20 nt, Artificial Sequence
  Description of Artificial Sequence: Synthetic oligonucleotide
cacucaccuuagccugagca

SEQ ID NO: 1479 - RNA, 20 nt, Artificial Sequence
  Description of Artificial Sequence: Synthetic oligonucleotide
cacgcaccuggacagcugac

SEQ ID NO: 1480 - DNA, 20 bp, Artificial Sequence
  Description of Artificial Sequence: Synthetic oligonucleotide
cacctacctaagaaccatcc

SEQ ID NO: 1481 - DNA, 20 bp, Artificial Sequence
  Description of Artificial Sequence: Synthetic oligonucleotide
ggagtctgagagatggagag

SEQ ID NO: 1482 - DNA, 20 bp, Artificial Sequence
  Description of Artificial Sequence: Synthetic oligonucleotide
ttctctctggaagggcacaa

SEQ ID NO: 1483 - DNA, 20 bp, Artificial Sequence
  Description of Artificial Sequence: Synthetic oligonucleotide
gacgttacctcgtgcggccc

SEQ ID NO: 1484 - DNA, 20 bp, Artificial Sequence
  Description of Artificial Sequence: Synthetic oligonucleotide
cctgcagagaaacacacttg

SEQ ID NO: 1485 - DNA, 20 bp, Artificial Sequence
  Description of Artificial Sequence: Synthetic oligonucleotide
ggggttccagggcctgtctg

SEQ ID NO: 1486 - DNA, 20 bp, Artificial Sequence
  Description of Artificial Sequence: Synthetic oligonucleotide
cagttccaaaccctggtggt

SEQ ID NO: 1487 - DNA, 20 bp, Artificial Sequence
  Description of Artificial Sequence: Synthetic oligonucleotide
ggacccagactagcagcacc

SEQ ID NO: 1488 - DNA, 20 bp, Artificial Sequence
  Description of Artificial Sequence: Synthetic oligonucleotide
cttacctgggctggggaaga

SEQ ID NO: 1489 - DNA, 20 bp, Artificial Sequence
  Description of Artificial Sequence: Synthetic oligonucleotide
ttcgtatctgtaaaaccaag

SEQ ID NO: 1490 - DNA, 20 bp, Artificial Sequence
  Description of Artificial Sequence: Synthetic oligonucleotide
tttcaaaacctgtcagtgat

SEQ ID NO: 1491 - DNA, 20 bp, Artificial Sequence
  Description of Artificial Sequence: Synthetic oligonucleotide
ttcaaaacctgtcagtgatt

SEQ ID NO: 1492 - DNA, 20 bp, Artificial Sequence
  Description of Artificial Sequence: Synthetic oligonucleotide
actcacgctggatagcctcc

SEQ ID NO: 1493 - DNA, 20 bp, Artificial Sequence
  Description of Artificial Sequence: Synthetic oligonucleotide
tcgatctatgaaaaagacag

SEQ ID NO: 1494 - DNA, 20 bp, Artificial Sequence
  Description of Artificial Sequence: Synthetic oligonucleotide
cttaccccacttaactatct

SEQ ID NO: 1495 - DNA, 20 bp, Artificial Sequence
  Description of Artificial Sequence: Synthetic oligonucleotide
ccatcggctcgcggcgagaa

SEQ ID NO: 1496 - DNA, 20 bp, Artificial Sequence
  Description of Artificial Sequence: Synthetic oligonucleotide
cctgtctgggagagagaagc

SEQ ID NO: 1497 - DNA, 20 bp, Artificial Sequence
  Description of Artificial Sequence: Synthetic oligonucleotide
gctcacctggctgagcagcc

SEQ ID NO: 1498 - DNA, 20 bp, Artificial Sequence
  Description of Artificial Sequence: Synthetic oligonucleotide
ctcacctggctgagcagcca

SEQ ID NO: 1499 - DNA, 20 bp, Artificial Sequence
  Description of Artificial Sequence: Synthetic oligonucleotide
accaagttctggaacaaaag

SEQ ID NO: 1500 - DNA, 20 bp, Artificial Sequence
  Description of Artificial Sequence: Synthetic oligonucleotide
gccaacctacagaaaaattg

SEQ ID NO: 1501 - DNA, 20 bp, Artificial Sequence
  Description of Artificial Sequence: Synthetic oligonucleotide
ccaacctacagaaaaattga

SEQ ID NO: 1502 - DNA, 20 bp, Artificial Sequence
  Description of Artificial Sequence: Synthetic oligonucleotide
agccttgcaggtgaagagac

SEQ ID NO: 1503 - DNA, 20 bp, Artificial Sequence
  Description of Artificial Sequence: Synthetic oligonucleotide
ctcaactctttcttgtcttc

SEQ ID NO: 1504 - DNA, 20 bp, Artificial Sequence
  Description of Artificial Sequence: Synthetic oligonucleotide
tcaactctttcttgtcttca

SEQ ID NO: 1505 - DNA, 20 bp, Artificial Sequence
  Description of Artificial Sequence: Synthetic oligonucleotide
cactacttcaaggggagcag

SEQ ID NO: 1506 - DNA, 20 bp, Artificial Sequence
  Description of Artificial Sequence: Synthetic oligonucleotide
acctaccgatgtgctcccgc

SEQ ID NO: 1507 - DNA, 20 bp, Artificial Sequence
  Description of Artificial Sequence: Synthetic oligonucleotide
ctggcgtctggggtgagata

SEQ ID NO: 1508 - DNA, 20 bp, Artificial Sequence
  Description of Artificial Sequence: Synthetic oligonucleotide
gagttaccttgtggcatggc

SEQ ID NO: 1509 - DNA, 20 bp, Artificial Sequence
  Description of Artificial Sequence: Synthetic oligonucleotide
atcctaccttgcagggatct

SEQ ID NO: 1510 - DNA, 20 bp, Artificial Sequence
  Description of Artificial Sequence: Synthetic oligonucleotide
tcacgtgaaagggtagacca

SEQ ID NO: 1511 - DNA, 20 bp, Artificial Sequence
  Description of Artificial Sequence: Synthetic oligonucleotide
atctacctgggcatagttca

SEQ ID NO: 1512 - DNA, 20 bp, Artificial Sequence
  Description of Artificial Sequence: Synthetic oligonucleotide
tgattacctgtccccaccaa

SEQ ID NO: 1513 - DNA, 20 bp, Artificial Sequence
  Description of Artificial Sequence: Synthetic oligonucleotide
ccccaatctgccaaggaatg

SEQ ID NO: 1514 - DNA, 20 bp, Artificial Sequence
  Description of Artificial Sequence: Synthetic oligonucleotide
ccatacctcagaggagaaca

SEQ ID NO: 1515 - DNA, 20 bp, Artificial Sequence
  Description of Artificial Sequence: Synthetic oligonucleotide
caagctcctgggcagagatg

SEQ ID NO: 1516 - DNA, 20 bp, Artificial Sequence
  Description of Artificial Sequence: Synthetic oligonucleotide
ttatctagaaatgaacccaa

SEQ ID NO: 1517 - DNA, 20 bp, Artificial Sequence
  Description of Artificial Sequence: Synthetic oligonucleotide
tgggcatggccacagacgac

SEQ ID NO: 1518 - DNA, 20 bp, Artificial Sequence
  Description of Artificial Sequence: Synthetic oligonucleotide
ctgctcaccggagcgggatg

SEQ ID NO: 1519 - DNA, 20 bp, Artificial Sequence
  Description of Artificial Sequence: Synthetic oligonucleotide
cagttgttccaacctagcat

SEQ ID NO: 1520 - DNA, 20 bp, Artificial Sequence
  Description of Artificial Sequence: Synthetic oligonucleotide
cactcccagggctgcgggga

SEQ ID NO: 1521 - DNA, 20 bp, Artificial Sequence
  Description of Artificial Sequence: Synthetic oligonucleotide
ccactcccagggctgcgggg

SEQ ID NO: 1522 - DNA, 20 bp, Artificial Sequence
  Description of Artificial Sequence: Synthetic oligonucleotide
gcgacgacagctgaagcaga

SEQ ID NO: 1523 - DNA, 20 bp, Artificial Sequence
  Description of Artificial Sequence: Synthetic oligonucleotide
ggagagccagcctctgccgg

SEQ ID NO: 1524 - DNA, 20 bp, Artificial Sequence
  Description of Artificial Sequence: Synthetic oligonucleotide
acatgagccagagaggggcg

SEQ ID NO: 1525 - DNA, 20 bp, Artificial Sequence
  Description of Artificial Sequence: Synthetic oligonucleotide
gaggcagcaagaacctttca

SEQ ID NO: 1526 - DNA, 20 bp, Artificial Sequence
  Description of Artificial Sequence: Synthetic oligonucleotide
tggcccacactcctggcggg

SEQ ID NO: 1527 - DNA, 20 bp, Artificial Sequence
  Description of Artificial Sequence: Synthetic oligonucleotide
cgttggcccacactcctggc

SEQ ID NO: 1528 - DNA, 20 bp, Artificial Sequence
  Description of Artificial Sequence: Synthetic oligonucleotide
ctgggactcttgggcactcc

SEQ ID NO: 1529 - DNA, 20 bp, Artificial Sequence
  Description of Artificial Sequence: Synthetic oligonucleotide
tgcgtgcctggaggggagat

SEQ ID NO: 1530 - DNA, 20 bp, Artificial Sequence
  Description of Artificial Sequence: Synthetic oligonucleotide
ctgcgtgcctggaggggaga

SEQ ID NO: 1531 - DNA, 20 bp, Artificial Sequence
  Description of Artificial Sequence: Synthetic oligonucleotide
ggtgattctgacagggcaag

SEQ ID NO: 1532 - DNA, 20 bp, Artificial Sequence
  Description of Artificial Sequence: Synthetic oligonucleotide
aagcctagcggggtgggcag

SEQ ID NO: 1533 - DNA, 20 bp, Artificial Sequence
  Description of Artificial Sequence: Synthetic oligonucleotide
cggactcacctggaacatgc

SEQ ID NO: 1534 - DNA, 20 bp, Artificial Sequence
  Description of Artificial Sequence: Synthetic oligonucleotide
agccctagggagtcatatga

SEQ ID NO: 1535 - DNA, 20 bp, Artificial Sequence
  Description of Artificial Sequence: Synthetic oligonucleotide
cagccctagggagtcatatg

SEQ ID NO: 1536 - DNA, 20 bp, Artificial Sequence
  Description of Artificial Sequence: Synthetic oligonucleotide
tctcacctgcagggtgcagt

SEQ ID NO: 1537 - DNA, 20 bp, Artificial Sequence
  Description of Artificial Sequence: Synthetic oligonucleotide
gtctcacctgcagggtgcag

SEQ ID NO: 1538 - DNA, 20 bp, Artificial Sequence
  Description of Artificial Sequence: Synthetic oligonucleotide
cacagcctgaggagaggcaa

SEQ ID NO: 1539 - DNA, 20 bp, Artificial Sequence
  Description of Artificial Sequence: Synthetic oligonucleotide
gcacagcctgaggagaggca

SEQ ID NO: 1540 - DNA, 20 bp, Artificial Sequence
  Description of Artificial Sequence: Synthetic oligonucleotide
gcactggaggacagggaaga

SEQ ID NO: 1541 - DNA, 20 bp, Artificial Sequence
  Description of Artificial Sequence: Synthetic oligonucleotide
ggcactggaggacagggaag

SEQ ID NO: 1542 - DNA, 20 bp, Artificial Sequence
  Description of Artificial Sequence: Synthetic oligonucleotide
cacccacctctggggtgtcc

SEQ ID NO: 1543 - DNA, 20 bp, Artificial Sequence
  Description of Artificial Sequence: Synthetic oligonucleotide
gcacctaggaggtccagaag

SEQ ID NO: 1544 - DNA, 20 bp, Artificial Sequence
  Description of Artificial Sequence: Synthetic oligonucleotide
cccttacccagctggtggac

SEQ ID NO: 1545 - DNA, 20 bp, Artificial Sequence
  Description of Artificial Sequence: Synthetic oligonucleotide
cttcactatcagggggtatg

SEQ ID NO: 1546 - DNA, 20 bp, Artificial Sequence
  Description of Artificial Sequence: Synthetic oligonucleotide
tcacttacaggtagcttcag

SEQ ID NO: 1547 - DNA, 20 bp, Artificial Sequence
  Description of Artificial Sequence: Synthetic oligonucleotide
gttcactgcatgcaaggttg

SEQ ID NO: 1548 - DNA, 20 bp, Artificial Sequence
  Description of Artificial Sequence: Synthetic oligonucleotide
tgttcactgcatgcaaggtt

SEQ ID NO: 1549 - DNA, 20 bp, Artificial Sequence
  Description of Artificial Sequence: Synthetic oligonucleotide
ctgttcactgcatgcaaggt

SEQ ID NO: 1550 - DNA, 20 bp, Artificial Sequence
  Description of Artificial Sequence: Synthetic oligonucleotide
ctctcctgtggggggccaga

SEQ ID NO: 1551 - DNA, 20 bp, Artificial Sequence
  Description of Artificial Sequence: Synthetic oligonucleotide
actctcctgtggggggccag

SEQ ID NO: 1552 - DNA, 20 bp, Artificial Sequence
  Description of Artificial Sequence: Synthetic oligonucleotide
gcaacttgagggagagagaa

SEQ ID NO: 1553 - DNA, 20 bp, Artificial Sequence
  Description of Artificial Sequence: Synthetic oligonucleotide
aggtactggggagccaaggc

SEQ ID NO: 1554 - DNA, 20 bp, Artificial Sequence
  Description of Artificial Sequence: Synthetic oligonucleotide
acctaccacatcgctcttgc

SEQ ID NO: 1555 - DNA, 20 bp, Artificial Sequence
  Description of Artificial Sequence: Synthetic oligonucleotide
ggaccactgtgaggggcaga

SEQ ID NO: 1556 - DNA, 20 bp, Artificial Sequence
  Description of Artificial Sequence: Synthetic oligonucleotide
aggaccactgtgaggggcag

SEQ ID NO: 1557 - DNA, 20 bp, Artificial Sequence
  Description of Artificial Sequence: Synthetic oligonucleotide
atacctagggcagcaaaatg

SEQ ID NO: 1558 - DNA, 20 bp, Artificial Sequence
  Description of Artificial Sequence: Synthetic oligonucleotide
gaggcatggctgaaatcttc

SEQ ID NO: 1559 - DNA, 20 bp, Artificial Sequence
  Description of Artificial Sequence: Synthetic oligonucleotide
tctacctgtttgccaggggg

SEQ ID NO: 1560 - DNA, 20 bp, Artificial Sequence
  Description of Artificial Sequence: Synthetic oligonucleotide
gactctacctgtttgccagg

SEQ ID NO: 1561 - DNA, 20 bp, Artificial Sequence
  Description of Artificial Sequence: Synthetic oligonucleotide
agtcctgggaagcagagacg

SEQ ID NO: 1562 - DNA, 20 bp, Artificial Sequence
  Description of Artificial Sequence: Synthetic oligonucleotide
gagtcctgggaagcagagac

SEQ ID NO: 1563 - DNA, 20 bp, Artificial Sequence
  Description of Artificial Sequence: Synthetic oligonucleotide
tgagtcctgggaagcagaga

SEQ ID NO: 1564 - DNA, 20 bp, Artificial Sequence
  Description of Artificial Sequence: Synthetic oligonucleotide
acttaccaggtgcagggtgt

SEQ ID NO: 1565 - DNA, 19 bp, Artificial Sequence
  Description of Artificial Sequence: Synthetic oligonucleotide
ggtagacaattgcagcctg

SEQ ID NO: 1566 - DNA, 20 bp, Artificial Sequence
  Description of Artificial Sequence: Synthetic oligonucleotide
gcctccccagctcagacctg

SEQ ID NO: 1567 - DNA, 20 bp, Artificial Sequence
  Description of Artificial Sequence: Synthetic oligonucleotide
tccctacagacagagccaca

SEQ ID NO: 1568 - DNA, 20 bp, Artificial Sequence
  Description of Artificial Sequence: Synthetic oligonucleotide
gagccacaaggtaatcctga

SEQ ID NO: 1569 - DNA, 20 bp, Artificial Sequence
  Description of Artificial Sequence: Synthetic oligonucleotide
gcccaagagttgcggcgtat

SEQ ID NO: 1570 - DNA, 20 bp, Artificial Sequence
  Description of Artificial Sequence: Synthetic oligonucleotide
aaaatacctgaaacaacaaa

SEQ ID NO: 1571 - DNA, 20 bp, Artificial Sequence
  Description of Artificial Sequence: Synthetic oligonucleotide
caatgactgcaaagatacaa

SEQ ID NO: 1572 - DNA, 20 bp, Artificial Sequence
  Description of Artificial Sequence: Synthetic oligonucleotide
acaatgactgcaaagataca

SEQ ID NO: 1573 - DNA, 20 bp, Artificial Sequence
  Description of Artificial Sequence: Synthetic oligonucleotide
aatgactgcatgcaaacacc

SEQ ID NO: 1574 - DNA, 20 bp, Artificial Sequence
  Description of Artificial Sequence: Synthetic oligonucleotide
atgactgcatgcaaacacca

SEQ ID NO: 1575 - DNA, 20 bp, Artificial Sequence
  Description of Artificial Sequence: Synthetic oligonucleotide
tgactgcatgcaaacaccag

SEQ ID NO: 1576 - DNA, 20 bp, Artificial Sequence
  Description of Artificial Sequence: Synthetic oligonucleotide
tactcaccttcaggtcccga

SEQ ID NO: 1577 - DNA, 20 bp, Artificial Sequence
  Description of Artificial Sequence: Synthetic oligonucleotide
actcaccaaaccacgcctgc

SEQ ID NO: 1578 - DNA, 20 bp, Artificial Sequence
  Description of Artificial Sequence: Synthetic oligonucleotide
taacttacctttactccatc

SEQ ID NO: 1579 - DNA, 20 bp, Artificial Sequence
  Description of Artificial Sequence: Synthetic oligonucleotide
aggtataccagcgctggggt

SEQ ID NO: 1580 - DNA, 20 bp, Artificial Sequence
  Description of Artificial Sequence: Synthetic oligonucleotide
tgaataccttgtttccatca

SEQ ID NO: 1581 - DNA, 20 bp, Artificial Sequence
  Description of Artificial Sequence: Synthetic oligonucleotide
ctgaataccttgtttccatc

SEQ ID NO: 1582 - DNA, 20 bp, Artificial Sequence
  Description of Artificial Sequence: Synthetic oligonucleotide
tcgtgctaaaggcaaaaata

SEQ ID NO: 1583 - DNA, 20 bp, Artificial Sequence
  Description of Artificial Sequence: Synthetic oligonucleotide
agctcaccatcgtgggcctg

SEQ ID NO: 1584 - DNA, 20 bp, Artificial Sequence
  Description of Artificial Sequence: Synthetic oligonucleotide
aagctcaccatcgtgggcct

SEQ ID NO: 1585 - DNA, 20 bp, Artificial Sequence
  Description of Artificial Sequence: Synthetic oligonucleotide
aaagctcaccatcgtgggcc

SEQ ID NO: 1586 - DNA, 20 bp, Artificial Sequence
  Description of Artificial Sequence: Synthetic oligonucleotide
atcctagtcagaggaggaaa

SEQ ID NO: 1587 - DNA, 20 bp, Artificial Sequence
  Description of Artificial Sequence: Synthetic oligonucleotide
gttatcctggggttgtgtac

SEQ ID NO: 1588 - DNA, 20 bp, Artificial Sequence
  Description of Artificial Sequence: Synthetic oligonucleotide
gaaccttcaaaggaccaaga

SEQ ID NO: 1589 - DNA, 20 bp, Artificial Sequence
  Description of Artificial Sequence: Synthetic oligonucleotide
tcacccgctccaccctttcc

SEQ ID NO: 1590 - DNA, 20 bp, Artificial Sequence
  Description of Artificial Sequence: Synthetic oligonucleotide
ataatctaagtcaaaataaa

SEQ ID NO: 1591 - DNA, 20 bp, Artificial Sequence
  Description of Artificial Sequence: Synthetic oligonucleotide
agtccatctttttaaaaggc

SEQ ID NO: 1592 - DNA, 20 bp, Artificial Sequence
  Description of Artificial Sequence: Synthetic oligonucleotide
catgaccctgtggtgggaaa

SEQ ID NO: 1593 - DNA, 20 bp, Artificial Sequence
  Description of Artificial Sequence: Synthetic oligonucleotide
ttaccatttgaaaattcatc

SEQ ID NO: 1594 - DNA, 20 bp, Artificial Sequence
  Description of Artificial Sequence: Synthetic oligonucleotide
catacagtcagtatcaattc

SEQ ID NO: 1595 - DNA, 20 bp, Artificial Sequence
  Description of Artificial Sequence: Synthetic oligonucleotide
ggtgtcgaaatgagaagaag

SEQ ID NO: 1596 - DNA, 20 bp, Artificial Sequence
  Description of Artificial Sequence: Synthetic oligonucleotide
atgcaggtgacagagactct

SEQ ID NO: 1597 - DNA, 20 bp, Artificial Sequence
  Description of Artificial Sequence: Synthetic oligonucleotide
tggggagcaggaaatatctg

SEQ ID NO: 1598 - DNA, 20 bp, Artificial Sequence
  Description of Artificial Sequence: Synthetic oligonucleotide
cacgcacctggacagctgac

SEQ ID NO: 1599 - DNA, 20 bp, Artificial Sequence
  Description of Artificial Sequence: Synthetic oligonucleotide
tctcaaaaccaaagatctcc

SEQ ID NO: 1600 - DNA, 20 bp, Artificial Sequence
  Description of Artificial Sequence: Synthetic oligonucleotide
caacacaaccctgacctgtg

SEQ ID NO: 1601 - DNA, 20 bp, Artificial Sequence
  Description of Artificial Sequence: Synthetic oligonucleotide
aaacagaggagtcggagaaa

SEQ ID NO: 1602 - DNA, 20 bp, Artificial Sequence
  Description of Artificial Sequence: Synthetic oligonucleotide
tcaccaaaaggaaaaaacag

SEQ ID NO: 1603 - DNA, 20 bp, Artificial Sequence
  Description of Artificial Sequence: Synthetic oligonucleotide
acacaagttcaccagcagaa

SEQ ID NO: 1604 - DNA, 20 bp, Artificial Sequence
  Description of Artificial Sequence: Synthetic oligonucleotide
gttcagccaaaacctcccca

SEQ ID NO: 1605 - DNA, 20 bp, Artificial Sequence
  Description of Artificial Sequence: Synthetic oligonucleotide
cttgggtcaggacatcaact

SEQ ID NO: 1606 - DNA, 20 bp, Artificial Sequence
  Description of Artificial Sequence: Synthetic oligonucleotide
cgatgatcaggatatctaca

SEQ ID NO: 1607 - DNA, 20 bp, Artificial Sequence
  Description of Artificial Sequence: Synthetic oligonucleotide
agccttaccttgcgagagaa

SEQ ID NO: 1608 - DNA, 20 bp, Artificial Sequence
  Description of Artificial Sequence: Synthetic oligonucleotide
tagccttaccttgcgagaga

SEQ ID NO: 1609 - DNA, 20 bp, Artificial Sequence
  Description of Artificial Sequence: Synthetic oligonucleotide
tcgcaaggtaaggctactcc

SEQ ID NO: 1610 - DNA, 20 bp, Artificial Sequence
  Description of Artificial Sequence: Synthetic oligonucleotide
ggcacactgtgggggaaggg

SEQ ID NO: 1611 - DNA, 20 bp, Artificial Sequence
  Description of Artificial Sequence: Synthetic oligonucleotide
gtgccagagctgtgtggagc

SEQ ID NO: 1612 - DNA, 20 bp, Artificial Sequence
  Description of Artificial Sequence: Synthetic oligonucleotide
ccgacacacaagctctgttg

SEQ ID NO: 1613 - DNA, 20 bp, Artificial Sequence
  Description of Artificial Sequence: Synthetic oligonucleotide
ggtctatcaggtgagcgttg

SEQ ID NO: 1614 - DNA, 20 bp, Artificial Sequence
  Description of Artificial Sequence: Synthetic oligonucleotide
gatgctcagtacagccacct

SEQ ID NO: 1615 - DNA, 20 bp, Artificial Sequence
  Description of Artificial Sequence: Synthetic oligonucleotide
ccgactgcatctttgtttca

SEQ ID NO: 1616 - DNA, 20 bp, Artificial Sequence
  Description of Artificial Sequence: Synthetic oligonucleotide
actcacctgataagaggcag

SEQ ID NO: 1617 - DNA, 20 bp, Artificial Sequence
  Description of Artificial Sequence: Synthetic oligonucleotide
taccacctgaaaatgaaaaa

SEQ ID NO: 1618 - DNA, 20 bp, Artificial Sequence
  Description of Artificial Sequence: Synthetic oligonucleotide
acacagacacgtgagtttat

SEQ ID NO: 1619 - DNA, 20 bp, Artificial Sequence
  Description of Artificial Sequence: Synthetic oligonucleotide
tatatgctggggagaaagaa

SEQ ID NO: 1620 - DNA, 20 bp, Artificial Sequence
  Description of Artificial Sequence: Synthetic oligonucleotide
ttatatgctggggagaaaga

SEQ ID NO: 1621 - DNA, 20 bp, Artificial Sequence
  Description of Artificial Sequence: Synthetic oligonucleotide
ctggattacctcttgccctc

SEQ ID NO: 1622 - DNA, 20 bp, Artificial Sequence
  Description of Artificial Sequence: Synthetic oligonucleotide
acactgtggggggtggggtg

SEQ ID NO: 1623 - DNA, 20 bp, Artificial Sequence
  Description of Artificial Sequence: Synthetic oligonucleotide
cacactgtggggggtggggt

SEQ ID NO: 1624 - DNA, 20 bp, Artificial Sequence
  Description of Artificial Sequence: Synthetic oligonucleotide
acacactgtggggggtgggg

SEQ ID NO: 1625 - DNA, 20 bp, Artificial Sequence
  Description of Artificial Sequence: Synthetic oligonucleotide
ttgtcctgcggaggaaggag

SEQ ID NO: 1626 - DNA, 20 bp, Artificial Sequence
  Description of Artificial Sequence: Synthetic oligonucleotide
tttgtcctgcggaggaagga

SEQ ID NO: 1627 - DNA, 20 bp, Artificial Sequence
  Description of Artificial Sequence: Synthetic oligonucleotide
ttttgtcctgcggaggaagg

SEQ ID NO: 1628 - DNA, 20 bp, Artificial Sequence
  Description of Artificial Sequence: Synthetic oligonucleotide
gttacctcatagtctgggtt

SEQ ID NO: 1629 - DNA, 20 bp, Artificial Sequence
  Description of Artificial Sequence: Synthetic oligonucleotide
cgttacctcatagtctgggt

SEQ ID NO: 1630 - DNA, 20 bp, Artificial Sequence
  Description of Artificial Sequence: Synthetic oligonucleotide
catggaacaggggaagggcc

SEQ ID NO: 1631 - DNA, 20 bp, Artificial Sequence
  Description of Artificial Sequence: Synthetic oligonucleotide
cttcaaggtaagggcctact

SEQ ID NO: 1632 - DNA, 20 bp, Artificial Sequence
  Description of Artificial Sequence: Synthetic oligonucleotide
tctcctacctttgattgact

SEQ ID NO: 1633 - DNA, 20 bp, Artificial Sequence
  Description of Artificial Sequence: Synthetic oligonucleotide
ttctcctacctttgattgac

SEQ ID NO: 1634 - DNA, 20 bp, Artificial Sequence
  Description of Artificial Sequence: Synthetic oligonucleotide
tggcccagtcaatcaaaggt

SEQ ID NO: 1635 - DNA, 20 bp, Artificial Sequence
  Description of Artificial Sequence: Synthetic oligonucleotide
acatacttctgtaatacact

SEQ ID NO: 1636 - DNA, 20 bp, Artificial Sequence
  Description of Artificial Sequence: Synthetic oligonucleotide
tgactatcaagaagatggtt

SEQ ID NO: 1637 - DNA, 20 bp, Artificial Sequence
  Description of Artificial Sequence: Synthetic oligonucleotide
tttaaaccatgtgatatttt

SEQ ID NO: 1638 - DNA, 20 bp, Artificial Sequence
  Description of Artificial Sequence: Synthetic oligonucleotide
ctcttccattgggtacataa

SEQ ID NO: 1639 - DNA, 20 bp, Artificial Sequence
  Description of Artificial Sequence: Synthetic oligonucleotide
tgaccagctctaccaggtaa

SEQ ID NO: 1640 - DNA, 20 bp, Artificial Sequence
  Description of Artificial Sequence: Synthetic oligonucleotide
gaccagtacagccaccttca

SEQ ID NO: 1641 - DNA, 20 bp, Artificial Sequence
  Description of Artificial Sequence: Synthetic oligonucleotide
accttcaaggaaaccagttg

SEQ ID NO: 1642 - DNA, 20 bp, Artificial Sequence
  Description of Artificial Sequence: Synthetic oligonucleotide
ggttcattgtggccttgccg

SEQ ID NO: 1643 - DNA, 20 bp, Artificial Sequence
  Description of Artificial Sequence: Synthetic oligonucleotide
gagcgctaagtggaaaagaa

SEQ ID NO: 1644 - DNA, 20 bp, Artificial Sequence
  Description of Artificial Sequence: Synthetic oligonucleotide
aaccctacctttagttaaga

SEQ ID NO: 1645 - DNA, 20 bp, Artificial Sequence
  Description of Artificial Sequence: Synthetic oligonucleotide
ggcagtcactgtggagggaa

SEQ ID NO: 1646 - DNA, 20 bp, Artificial Sequence
  Description of Artificial Sequence: Synthetic oligonucleotide
tggaaagctggaggtgggaa

SEQ ID NO: 1647 - DNA, 20 bp, Artificial Sequence
  Description of Artificial Sequence: Synthetic oligonucleotide
cctcacctctcatcaccacc

SEQ ID NO: 1648 - DNA, 20 bp, Artificial Sequence
  Description of Artificial Sequence: Synthetic oligonucleotide
agtggctgcagaggaacgag

SEQ ID NO: 1649 - DNA, 20 bp, Artificial Sequence
  Description of Artificial Sequence: Synthetic oligonucleotide
gcgctgtccagggacaagaa

SEQ ID NO: 1650 - DNA, 20 bp, Artificial Sequence
  Description of Artificial Sequence: Synthetic oligonucleotide
tccttactgaggacactggc

SEQ ID NO: 1651 - DNA, 20 bp, Artificial Sequence
  Description of Artificial Sequence: Synthetic oligonucleotide
ccatctggagcttagggtcc

SEQ ID NO: 1652 - DNA, 20 bp, Artificial Sequence
  Description of Artificial Sequence: Synthetic oligonucleotide
ggttggcatgtggaggcagc

SEQ ID NO: 1653 - DNA, 20 bp, Artificial Sequence
  Description of Artificial Sequence: Synthetic oligonucleotide
gggtcataccagctgagccg

SEQ ID NO: 1654 - DNA, 20 bp, Artificial Sequence
  Description of Artificial Sequence: Synthetic oligonucleotide
tggaaatctgggggtcagaa

SEQ ID NO: 1655 - DNA, 20 bp, Artificial Sequence
  Description of Artificial Sequence: Synthetic oligonucleotide
gttacccacctaagcaggtc

SEQ ID NO: 1656 - DNA, 20 bp, Artificial Sequence
  Description of Artificial Sequence: Synthetic oligonucleotide
tctgccagcggctgaactgt

SEQ ID NO: 1657 - DNA, 20 bp, Artificial Sequence
  Description of Artificial Sequence: Synthetic oligonucleotide
ctgccagcggctgaactgtg

SEQ ID NO: 1658 - DNA, 20 bp, Artificial Sequence
  Description of Artificial Sequence: Synthetic oligonucleotide
cctcccactgcttggagctc

SEQ ID NO: 1659 - DNA, 20 bp, Artificial Sequence
  Description of Artificial Sequence: Synthetic oligonucleotide
gaagtgccagggccagctgg

SEQ ID NO: 1660 - DNA, 20 bp, Artificial Sequence
  Description of Artificial Sequence: Synthetic oligonucleotide
ccatgtgccatccgtccttg

SEQ ID NO: 1661 - DNA, 20 bp, Artificial Sequence
  Description of Artificial Sequence: Synthetic oligonucleotide
tttgcagccagagctggggc

SEQ ID NO: 1662 - DNA, 20 bp, Artificial Sequence
  Description of Artificial Sequence: Synthetic oligonucleotide
ggttctgcaatgagacactc

SEQ ID NO: 1663 - DNA, 20 bp, Artificial Sequence
  Description of Artificial Sequence: Synthetic oligonucleotide
ctccagagcccacaggtaag

SEQ ID NO: 1664 - DNA, 20 bp, Artificial Sequence
  Description of Artificial Sequence: Synthetic oligonucleotide
accacaactccagagcccac

SEQ ID NO: 1665 - DNA, 20 bp, Artificial Sequence
  Description of Artificial Sequence: Synthetic oligonucleotide
gagctaggagaggagagagc

SEQ ID NO: 1666 - DNA, 20 bp, Artificial Sequence
  Description of Artificial Sequence: Synthetic oligonucleotide
ctcacttacctgagcaaagg

SEQ ID NO: 1667 - DNA, 20 bp, Artificial Sequence
  Description of Artificial Sequence: Synthetic oligonucleotide
ctgcagctggtggcacagtc

SEQ ID NO: 1668 - DNA, 20 bp, Artificial Sequence
  Description of Artificial Sequence: Synthetic oligonucleotide
gatcttccattggattggca

SEQ ID NO: 1669 - DNA, 20 bp, Artificial Sequence
  Description of Artificial Sequence: Synthetic oligonucleotide
tgaggcccaggacaagaccc

SEQ ID NO: 1670 - DNA, 20 bp, Artificial Sequence
  Description of Artificial Sequence: Synthetic oligonucleotide
aaacctgagaggggaagcaa

SEQ ID NO: 1671 - DNA, 20 bp, Artificial Sequence
  Description of Artificial Sequence: Synthetic oligonucleotide
ctcccaccgcagcgagctcc

SEQ ID NO: 1672 - DNA, 20 bp, Artificial Sequence
  Description of Artificial Sequence: Synthetic oligonucleotide
tttccagcccaaggtgcaga

SEQ ID NO: 1673 - DNA, 20 bp, Artificial Sequence
  Description of Artificial Sequence: Synthetic oligonucleotide
ggtgcagagccgtctggtgg

SEQ ID NO: 1674 - DNA, 20 bp, Artificial Sequence
  Description of Artificial Sequence: Synthetic oligonucleotide
aggtgcagagccgtctggtg

SEQ ID NO: 1675 - DNA, 20 bp, Artificial Sequence
  Description of Artificial Sequence: Synthetic oligonucleotide
tcctatcgagtgctggacgc

SEQ ID NO: 1676 - DNA, 20 bp, Artificial Sequence
  Description of Artificial Sequence: Synthetic oligonucleotide
aaggtgcagagccgtctggt

SEQ ID NO: 1677 - DNA, 20 bp, Artificial Sequence
  Description of Artificial Sequence: Synthetic oligonucleotide
caaggtgcagagccgtctgg

SEQ ID NO: 1678 - DNA, 20 bp, Artificial Sequence
  Description of Artificial Sequence: Synthetic oligonucleotide
gggctgcccactgagccccc

SEQ ID NO: 1679 - DNA, 20 bp, Artificial Sequence
  Description of Artificial Sequence: Synthetic oligonucleotide
aggtgcgccagggggctcag

SEQ ID NO: 1680 - DNA, 20 bp, Artificial Sequence
  Description of Artificial Sequence: Synthetic oligonucleotide
ggccaggatccaaaccccgc

SEQ ID NO: 1681 - DNA, 20 bp, Artificial Sequence
  Description of Artificial Sequence: Synthetic oligonucleotide
cgccagtggattggcccaac

SEQ ID NO: 1682 - DNA, 20 bp, Artificial Sequence
  Description of Artificial Sequence: Synthetic oligonucleotide
gcgccagtggattggcccaa

SEQ ID NO: 1683 - DNA, 20 bp, Artificial Sequence
  Description of Artificial Sequence: Synthetic oligonucleotide
aagaagcagcgccagtggat

SEQ ID NO: 1684 - DNA, 20 bp, Artificial Sequence
  Description of Artificial Sequence: Synthetic oligonucleotide
gcttacctggataagctgac

SEQ ID NO: 1685 - DNA, 20 bp, Artificial Sequence
  Description of Artificial Sequence: Synthetic oligonucleotide
aaagacactgggcagatggt

SEQ ID NO: 1686 - DNA, 20 bp, Artificial Sequence
  Description of Artificial Sequence: Synthetic oligonucleotide
ttccagagctggggaaagaa

SEQ ID NO: 1687 - DNA, 20 bp, Artificial Sequence
  Description of Artificial Sequence: Synthetic oligonucleotide
actcacccagcatccccagc

SEQ ID NO: 1688 - DNA, 20 bp, Artificial Sequence
  Description of Artificial Sequence: Synthetic oligonucleotide
agcgactgcagaaagaagag

SEQ ID NO: 1689 - DNA, 20 bp, Artificial Sequence
  Description of Artificial Sequence: Synthetic oligonucleotide
cataccagctgagccgtccg

SEQ ID NO: 1690 - DNA, 20 bp, Artificial Sequence
  Description of Artificial Sequence: Synthetic oligonucleotide
aaggccatgacgcgctcccc

SEQ ID NO: 1691 - DNA, 20 bp, Artificial Sequence
  Description of Artificial Sequence: Synthetic oligonucleotide
tcacggagcagcaaggccag

SEQ ID NO: 1692 - DNA, 20 bp, Artificial Sequence
  Description of Artificial Sequence: Synthetic oligonucleotide
cgcggacctggcaggaagac

SEQ ID NO: 1693 - DNA, 20 bp, Artificial Sequence
  Description of Artificial Sequence: Synthetic oligonucleotide
tcacctgcgccccccgccgc

SEQ ID NO: 1694 - DNA, 20 bp, Artificial Sequence
  Description of Artificial Sequence: Synthetic oligonucleotide
cttactgtggttgcagtaaa

SEQ ID NO: 1695 - DNA, 20 bp, Artificial Sequence
  Description of Artificial Sequence: Synthetic oligonucleotide
acttactgtggttgcagtaa

SEQ ID NO: 1696 - DNA, 20 bp, Artificial Sequence
  Description of Artificial Sequence: Synthetic oligonucleotide
ttggccatagggctccaggc

SEQ ID NO: 1697 - DNA, 20 bp, Artificial Sequence
  Description of Artificial Sequence: Synthetic oligonucleotide
gttggccatagggctccagg

SEQ ID NO: 1698 - DNA, 20 bp, Artificial Sequence
  Description of Artificial Sequence: Synthetic oligonucleotide
gcgccagcagtggagcggtc

SEQ ID NO: 1699 - DNA, 20 bp, Artificial Sequence
  Description of Artificial Sequence: Synthetic oligonucleotide
aattaccttgttgcaaggta

SEQ ID NO: 1700 - DNA, 20 bp, Artificial Sequence
  Description of Artificial Sequence: Synthetic oligonucleotide
ctatcagccactaatgaagt

SEQ ID NO: 1701 - DNA, 20 bp, Artificial Sequence
  Description of Artificial Sequence: Synthetic oligonucleotide
ctgctccaaagaagaatcta

SEQ ID NO: 1702 - DNA, 20 bp, Artificial Sequence
  Description of Artificial Sequence: Synthetic oligonucleotide
actatcaatcttgcccagac

SEQ ID NO: 1703 - DNA, 20 bp, Artificial Sequence
  Description of Artificial Sequence: Synthetic oligonucleotide
ttttccagaatactgaaaca

SEQ ID NO: 1704 - DNA, 20 bp, Artificial Sequence
  Description of Artificial Sequence: Synthetic oligonucleotide
gttttccagaatactgaaac

SEQ ID NO: 1705 - DNA, 20 bp, Artificial Sequence
  Description of Artificial Sequence: Synthetic oligonucleotide
ttacctgtagatattcttgc

SEQ ID NO: 1706 - DNA, 20 bp, Artificial Sequence
  Description of Artificial Sequence: Synthetic oligonucleotide
ctcaccccaagtgactcgag

SEQ ID NO: 1707 - DNA, 20 bp, Artificial Sequence
  Description of Artificial Sequence: Synthetic oligonucleotide
gtgcatccagcgcttcgcac

SEQ ID NO: 1708 - DNA, 20 bp, Artificial Sequence
  Description of Artificial Sequence: Synthetic oligonucleotide
gagctgcagctgaatcacac

SEQ ID NO: 1709 - DNA, 20 bp, Artificial Sequence
  Description of Artificial Sequence: Synthetic oligonucleotide
ctggcaggggggcccagcac

SEQ ID NO: 1710 - DNA, 20 bp, Artificial Sequence
  Description of Artificial Sequence: Synthetic oligonucleotide
ctcccagcgcctgacgcccc

SEQ ID NO: 1711 - DNA, 20 bp, Artificial Sequence
  Description of Artificial Sequence: Synthetic oligonucleotide
ccccctgccagtatagcctg

SEQ ID NO: 1712 - DNA, 20 bp, Artificial Sequence
  Description of Artificial Sequence: Synthetic oligonucleotide
cccccctgccagtatagcct

SEQ ID NO: 1713 - DNA, 20 bp, Artificial Sequence
  Description of Artificial Sequence: Synthetic oligonucleotide
tgagcccatcccgccagtcc

SEQ ID NO: 1714 - DNA, 20 bp, Artificial Sequence
  Description of Artificial Sequence: Synthetic oligonucleotide
tcaccagccccagcaggcag

SEQ ID NO: 1715 - DNA, 20 bp, Artificial Sequence
  Description of Artificial Sequence: Synthetic oligonucleotide
aagtactggggacacagagc

SEQ ID NO: 1716 - DNA, 20 bp, Artificial Sequence
  Description of Artificial Sequence: Synthetic oligonucleotide
acttcacctgggcaaggcag

SEQ ID NO: 1717 - DNA, 20 bp, Artificial Sequence
  Description of Artificial Sequence: Synthetic oligonucleotide
cacttcacctgggcaaggca

SEQ ID NO: 1718 - DNA, 20 bp, Artificial Sequence
  Description of Artificial Sequence: Synthetic oligonucleotide
ccgcacacctcctggtacac

SEQ ID NO: 1719 - DNA, 20 bp, Artificial Sequence
  Description of Artificial Sequence: Synthetic oligonucleotide
agccctgcaagggcagaatg

SEQ ID NO: 1720 - DNA, 20 bp, Artificial Sequence
  Description of Artificial Sequence: Synthetic oligonucleotide
ccaggagctgtggggagagg

SEQ ID NO: 1721 - DNA, 20 bp, Artificial Sequence
  Description of Artificial Sequence: Synthetic oligonucleotide
gttcttaccagagagcagga

SEQ ID NO: 1722 - DNA, 20 bp, Artificial Sequence
  Description of Artificial Sequence: Synthetic oligonucleotide
gcacctaaaaaagaaggtta

SEQ ID NO: 1723 - DNA, 20 bp, Artificial Sequence
  Description of Artificial Sequence: Synthetic oligonucleotide
ttggcaggaccaggaaaact

SEQ ID NO: 1724 - DNA, 20 bp, Artificial Sequence
  Description of Artificial Sequence: Synthetic oligonucleotide
caatcttcagatcaaggaca

SEQ ID NO: 1725 - DNA, 20 bp, Artificial Sequence
  Description of Artificial Sequence: Synthetic oligonucleotide
gtaatccaaggaatgtggtc

SEQ ID NO: 1726 - DNA, 20 bp, Artificial Sequence
  Description of Artificial Sequence: Synthetic oligonucleotide
agagtgaacagaccaagaaa

SEQ ID NO: 1727 - DNA, 20 bp, Artificial Sequence
  Description of Artificial Sequence: Synthetic oligonucleotide
ggacatccagtctggtggtg

SEQ ID NO: 1728 - DNA, 20 bp, Artificial Sequence
  Description of Artificial Sequence: Synthetic oligonucleotide
aatgcatcctggaatggaaa

SEQ ID NO: 1729 - DNA, 20 bp, Artificial Sequence
  Description of Artificial Sequence: Synthetic oligonucleotide
gcactcacctgtgaatagaa

SEQ ID NO: 1730 - DNA, 20 bp, Artificial Sequence
  Description of Artificial Sequence: Synthetic oligonucleotide
taaaacagctgagacttaaa

SEQ ID NO: 1731 - DNA, 20 bp, Artificial Sequence
  Description of Artificial Sequence: Synthetic oligonucleotide
gcttcctacaagaaaaggtc

SEQ ID NO: 1732 - DNA, 20 bp, Artificial Sequence
  Description of Artificial Sequence: Synthetic oligonucleotide
ttacccagaccttttcttgt

SEQ ID NO: 1733 - DNA, 20 bp, Artificial Sequence
  Description of Artificial Sequence: Synthetic oligonucleotide
cagcatttccacaggacaga

SEQ ID NO: 1734 - DNA, 20 bp, Artificial Sequence
  Description of Artificial Sequence: Synthetic oligonucleotide
ccagcatttccacaggacag

SEQ ID NO: 1735 - DNA, 20 bp, Artificial Sequence
  Description of Artificial Sequence: Synthetic oligonucleotide
acttaccaaatacaaaaacc

SEQ ID NO: 1736 - DNA, 20 bp, Artificial Sequence
  Description of Artificial Sequence: Synthetic oligonucleotide
gattctgatcagaaaggcat

SEQ ID NO: 1737 - DNA, 20 bp, Artificial Sequence
  Description of Artificial Sequence: Synthetic oligonucleotide
tgaattctgaggaatacaga

SEQ ID NO: 1738 - DNA, 20 bp, Artificial Sequence
  Description of Artificial Sequence: Synthetic oligonucleotide
atgacatacgtgatttctcc

SEQ ID NO: 1739 - DNA, 20 bp, Artificial Sequence
  Description of Artificial Sequence: Synthetic oligonucleotide
tcctgctcctgcacaagaaa

SEQ ID NO: 1740 - DNA, 20 bp, Artificial Sequence
  Description of Artificial Sequence: Synthetic oligonucleotide
tcaccctaggagcaaaacaa

SEQ ID NO: 1741 - DNA, 20 bp, Artificial Sequence
  Description of Artificial Sequence: Synthetic oligonucleotide
cgcagcatcttcctgtgagg

SEQ ID NO: 1742 - DNA, 20 bp, Artificial Sequence
  Description of Artificial Sequence: Synthetic oligonucleotide
gctcctgggggtagggggag

SEQ ID NO: 1743 - DNA, 20 bp, Artificial Sequence
  Description of Artificial Sequence: Synthetic oligonucleotide
ggtgctcaccggccacctgc

SEQ ID NO: 1744 - DNA, 20 bp, Artificial Sequence
  Description of Artificial Sequence: Synthetic oligonucleotide
agggagctggaggtgacaga

SEQ ID NO: 1745 - DNA, 20 bp, Artificial Sequence
  Description of Artificial Sequence: Synthetic oligonucleotide
tagggagctggaggtgacag

SEQ ID NO: 1746 - DNA, 20 bp, Artificial Sequence
  Description of Artificial Sequence: Synthetic oligonucleotide
gcaacctgtggggcttctct

SEQ ID NO: 1747 - DNA, 20 bp, Artificial Sequence
  Description of Artificial Sequence: Synthetic oligonucleotide
agcaacctgtggggcttctc

SEQ ID NO: 1748 - DNA, 20 bp, Artificial Sequence
  Description of Artificial Sequence: Synthetic oligonucleotide
ctcctgggggcggggtcaga

SEQ ID NO: 1749 - DNA, 20 bp, Artificial Sequence
  Description of Artificial Sequence: Synthetic oligonucleotide
gctcctgggggcggggtcag

SEQ ID NO: 1750 - DNA, 20 bp, Artificial Sequence
  Description of Artificial Sequence: Synthetic oligonucleotide
ggtgctcaccggccacctgc

SEQ ID NO: 1751 - DNA, 20 bp, Artificial Sequence
  Description of Artificial Sequence: Synthetic oligonucleotide
agggagctggaggtgacaga

SEQ ID NO: 1752 - DNA, 20 bp, Artificial Sequence
  Description of Artificial Sequence: Synthetic oligonucleotide
tagggagctggaggtgacag

SEQ ID NO: 1753 - DNA, 20 bp, Artificial Sequence
  Description of Artificial Sequence: Synthetic oligonucleotide
gcagggctgtaaaaaaagga

SEQ ID NO: 1754 - DNA, 20 bp, Artificial Sequence
  Description of Artificial Sequence: Synthetic oligonucleotide
catcatcttcatttcatgat

SEQ ID NO: 1755 - DNA, 20 bp, Artificial Sequence
  Description of Artificial Sequence: Synthetic oligonucleotide
ccatcatcttcatttcatga

SEQ ID NO: 1756 - DNA, 20 bp, Artificial Sequence
  Description of Artificial Sequence: Synthetic oligonucleotide
gtccattgtcacagcctctg

SEQ ID NO: 1757 - DNA, 20 bp, Artificial Sequence
  Description of Artificial Sequence: Synthetic oligonucleotide
cactcacccatctttcctct

SEQ ID NO: 1758 - DNA, 20 bp, Artificial Sequence
  Description of Artificial Sequence: Synthetic oligonucleotide
acttactctgatgtaggaag

SEQ ID NO: 1759 - DNA, 20 bp, Artificial Sequence
  Description of Artificial Sequence: Synthetic oligonucleotide
cttactctgatgtaggaagt

SEQ ID NO: 1760 - DNA, 20 bp, Artificial Sequence
  Description of Artificial Sequence: Synthetic oligonucleotide
ttggaatacctgatagtctg

SEQ ID NO: 1761 - DNA, 20 bp, Artificial Sequence
  Description of Artificial Sequence: Synthetic oligonucleotide
ggaacgctggaaaggagatg

SEQ ID NO: 1762 - DNA, 20 bp, Artificial Sequence
  Description of Artificial Sequence: Synthetic oligonucleotide
gaacgctggaaaggagatga

SEQ ID NO: 1763 - DNA, 20 bp, Artificial Sequence
  Description of Artificial Sequence: Synthetic oligonucleotide
acgtttgacatctttctccc

SEQ ID NO: 1764 - DNA, 20 bp, Artificial Sequence
  Description of Artificial Sequence: Synthetic oligonucleotide
caaacgtgcgagtgtctaac

SEQ ID NO: 1765 - DNA, 20 bp, Artificial Sequence
  Description of Artificial Sequence: Synthetic oligonucleotide
cgagtggcaagaggtggaga

SEQ ID NO: 1766 - DNA, 20 bp, Artificial Sequence
  Description of Artificial Sequence: Synthetic oligonucleotide
gagtggcaagaggtggagaa

SEQ ID NO: 1767 - DNA, 20 bp, Artificial Sequence
  Description of Artificial Sequence: Synthetic oligonucleotide
aggagagccaggatgtcagc

SEQ ID NO: 1768 - DNA, 20 bp, Artificial Sequence
  Description of Artificial Sequence: Synthetic oligonucleotide
ggacagccagacggggttag

SEQ ID NO: 1769 - DNA, 20 bp, Artificial Sequence
  Description of Artificial Sequence: Synthetic oligonucleotide
cggagcaatgcgcaggaata

SEQ ID NO: 1770 - DNA, 20 bp, Artificial Sequence
  Description of Artificial Sequence: Synthetic oligonucleotide
aggaagcgacctgcaaccga

SEQ ID NO: 1771 - DNA, 20 bp, Artificial Sequence
  Description of Artificial Sequence: Synthetic oligonucleotide
gagcagacgcccaagaagcc

SEQ ID NO: 1772 - DNA, 20 bp, Artificial Sequence
  Description of Artificial Sequence: Synthetic oligonucleotide
gctgcagagcctgctgctct

SEQ ID NO: 1773 - DNA, 20 bp, Artificial Sequence
  Description of Artificial Sequence: Synthetic oligonucleotide
gctcccagggctgcgtgctg

SEQ ID NO: 1774 - DNA, 20 bp, Artificial Sequence
  Description of Artificial Sequence: Synthetic oligonucleotide
tgctcccagggctgcgtgct

SEQ ID NO: 1775 - DNA, 20 bp, Artificial Sequence
  Description of Artificial Sequence: Synthetic oligonucleotide
atgctcccagggctgcgtgc

SEQ ID NO: 1776 - DNA, 20 bp, Artificial Sequence
  Description of Artificial Sequence: Synthetic oligonucleotide
aggcactcaccggggttgga

SEQ ID NO: 1777 - DNA, 20 bp, Artificial Sequence
  Description of Artificial Sequence: Synthetic oligonucleotide
ctggctcccagcagtcaaag

SEQ ID NO: 1778 - DNA, 20 bp, Artificial Sequence
  Description of Artificial Sequence: Synthetic oligonucleotide
tgacatcttctcaggagctc

SEQ ID NO: 1779 - DNA, 20 bp, Artificial Sequence
  Description of Artificial Sequence: Synthetic oligonucleotide
tcacggcatgaggctgagtt

SEQ ID NO: 1780 - DNA, 20 bp, Artificial Sequence
  Description of Artificial Sequence: Synthetic oligonucleotide
gaaccaactggggagcagca

SEQ ID NO: 1781 - DNA, 20 bp, Artificial Sequence
  Description of Artificial Sequence: Synthetic oligonucleotide
ggaaccaactggggagcagc

SEQ ID NO: 1782 - DNA, 20 bp, Artificial Sequence
  Description of Artificial Sequence: Synthetic oligonucleotide
tcacctccaccagctgcatg

SEQ ID NO: 1783 - DNA, 20 bp, Artificial Sequence
  Description of Artificial Sequence: Synthetic oligonucleotide
gtagtgctgcagggtgtggg

SEQ ID NO: 1784 - DNA, 20 bp, Artificial Sequence
  Description of Artificial Sequence: Synthetic oligonucleotide
tgtagtgctgcagggtgtgg

SEQ ID NO: 1785 - DNA, 20 bp, Artificial Sequence
  Description of Artificial Sequence: Synthetic oligonucleotide
cacgtctgggggcagagagg

SEQ ID NO: 1786 - DNA, 20 bp, Artificial Sequence
  Description of Artificial Sequence: Synthetic oligonucleotide
catcacgtctgggggcagag

SEQ ID NO: 1787 - DNA, 20 bp, Artificial Sequence
  Description of Artificial Sequence: Synthetic oligonucleotide
aggctcccctgggggcagga

SEQ ID NO: 1788 - DNA, 20 bp, Artificial Sequence
  Description of Artificial Sequence: Synthetic oligonucleotide
tcactcacagcgagaacttg

SEQ ID NO: 1789 - DNA, 20 bp, Artificial Sequence
  Description of Artificial Sequence: Synthetic oligonucleotide
cagccccaccttctctctca

SEQ ID NO: 1790 - DNA, 20 bp, Artificial Sequence
  Description of Artificial Sequence: Synthetic oligonucleotide
gagaatttctgccatgtgga

SEQ ID NO: 1791 - DNA, 20 bp, Artificial Sequence
  Description of Artificial Sequence: Synthetic oligonucleotide
atactcacaattcttggata

SEQ ID NO: 1792 - DNA, 20 bp, Artificial Sequence
  Description of Artificial Sequence: Synthetic oligonucleotide
caggggctgtggccaggggg

SEQ ID NO: 1793 - DNA, 20 bp, Artificial Sequence
  Description of Artificial Sequence: Synthetic oligonucleotide
actcacctttgcagaagaca

SEQ ID NO: 1794 - DNA, 20 bp, Artificial Sequence
  Description of Artificial Sequence: Synthetic oligonucleotide
cactcacctttgcagaagac

SEQ ID NO: 1795 - DNA, 20 bp, Artificial Sequence
  Description of Artificial Sequence: Synthetic oligonucleotide
agggccaggtcctggtagcc

SEQ ID NO: 1796 - DNA, 20 bp, Artificial Sequence
  Description of Artificial Sequence: Synthetic oligonucleotide
ggcccagcctgctgtggtac

SEQ ID NO: 1797 - DNA, 20 bp, Artificial Sequence
  Description of Artificial Sequence: Synthetic oligonucleotide
gcttcggcaggctgacagcc

SEQ ID NO: 1798 - DNA, 20 bp, Artificial Sequence
  Description of Artificial Sequence: Synthetic oligonucleotide
tatccaaggactgagggcca

SEQ ID NO: 1799 - DNA, 20 bp, Artificial Sequence
  Description of Artificial Sequence: Synthetic oligonucleotide
ggaacccagatttatgtaat

SEQ ID NO: 1800 - DNA, 20 bp, Artificial Sequence
  Description of Artificial Sequence: Synthetic oligonucleotide
gctcaccaattacataaatc

SEQ ID NO: 1801 - DNA, 20 bp, Artificial Sequence
  Description of Artificial Sequence: Synthetic oligonucleotide
ctcaccaattacataaatct

SEQ ID NO: 1802 - DNA, 20 bp, Artificial Sequence
  Description of Artificial Sequence: Synthetic oligonucleotide
ctcagctgaacctggctacc

SEQ ID NO: 1803 - DNA, 20 bp, Artificial Sequence
  Description of Artificial Sequence: Synthetic oligonucleotide
ttaacatctactacatacaa

SEQ ID NO: 1804 - DNA, 20 bp, Artificial Sequence
  Description of Artificial Sequence: Synthetic oligonucleotide
cttacctggatatagtcaac

SEQ ID NO: 1805 - DNA, 20 bp, Artificial Sequence
  Description of Artificial Sequence: Synthetic oligonucleotide
atccagcgtaagaataacag

SEQ ID NO: 1806 - DNA, 20 bp, Artificial Sequence
  Description of Artificial Sequence: Synthetic oligonucleotide
gtatgtacaacaaaataatg

SEQ ID NO: 1807 - DNA, 20 bp, Artificial Sequence
  Description of Artificial Sequence: Synthetic oligonucleotide
cgagatcaagttgtacgtta

SEQ ID NO: 1808 - DNA, 20 bp, Artificial Sequence
  Description of Artificial Sequence: Synthetic oligonucleotide
tgccagatgttaatgatttt

SEQ ID NO: 1809 - DNA, 20 bp, Artificial Sequence
  Description of Artificial Sequence: Synthetic oligonucleotide
atgtcagttcacgtcaaaac

SEQ ID NO: 1810 - DNA, 20 bp, Artificial Sequence
  Description of Artificial Sequence: Synthetic oligonucleotide
gccctacagtccctcgcctg

SEQ ID NO: 1811 - DNA, 20 bp, Artificial Sequence
  Description of Artificial Sequence: Synthetic oligonucleotide
gtccagaatttccagaagta

SEQ ID NO: 1812 - DNA, 20 bp, Artificial Sequence
  Description of Artificial Sequence: Synthetic oligonucleotide
tccctggaggggtgggggag

SEQ ID NO: 1813 - DNA, 20 bp, Artificial Sequence
  Description of Artificial Sequence: Synthetic oligonucleotide
tcacttcaacaggactccta

SEQ ID NO: 1814 - DNA, 20 bp, Artificial Sequence
  Description of Artificial Sequence: Synthetic oligonucleotide
ccttacactcaaaggcaaag

SEQ ID NO: 1815 - DNA, 20 bp, Artificial Sequence
  Description of Artificial Sequence: Synthetic oligonucleotide
atggctgcagggagaggaag

SEQ ID NO: 1816 - DNA, 20 bp, Artificial Sequence
  Description of Artificial Sequence: Synthetic oligonucleotide
ggagcgccaggggatgctgg

SEQ ID NO: 1817 - DNA, 20 bp, Artificial Sequence
  Description of Artificial Sequence: Synthetic oligonucleotide
tcacgtcccatgcagccaca

SEQ ID NO: 1818 - DNA, 20 bp, Artificial Sequence
  Description of Artificial Sequence: Synthetic oligonucleotide
tggacgtctggtggggagta

SEQ ID NO: 1819 - DNA, 20 bp, Artificial Sequence
  Description of Artificial Sequence: Synthetic oligonucleotide
actcacattgatgaggaaga

SEQ ID NO: 1820 - DNA, 20 bp, Artificial Sequence
  Description of Artificial Sequence: Synthetic oligonucleotide
cagcatctgagaaaggcaga

SEQ ID NO: 1821 - DNA, 20 bp, Artificial Sequence
  Description of Artificial Sequence: Synthetic oligonucleotide
aatccaacacctcagcgatg

SEQ ID NO: 1822 - DNA, 20 bp, Artificial Sequence
  Description of Artificial Sequence: Synthetic oligonucleotide
atccaacacctcagcgatgt

SEQ ID NO: 1823 - DNA, 20 bp, Artificial Sequence
  Description of Artificial Sequence: Synthetic oligonucleotide
gtggccattccttagtcttg

SEQ ID NO: 1824 - DNA, 20 bp, Artificial Sequence
  Description of Artificial Sequence: Synthetic oligonucleotide
cttaccgatgttcccttcga

SEQ ID NO: 1825 - DNA, 20 bp, Artificial Sequence
  Description of Artificial Sequence: Synthetic oligonucleotide
ttaaacaattgtgtgaagat

SEQ ID NO: 1826 - DNA, 20 bp, Artificial Sequence
  Description of Artificial Sequence: Synthetic oligonucleotide
taaacaattgtgtgaagatt

SEQ ID NO: 1827 - DNA, 20 bp, Artificial Sequence
  Description of Artificial Sequence: Synthetic oligonucleotide
caccatctggcaacaggttc

SEQ ID NO: 1828 - DNA, 20 bp, Artificial Sequence
  Description of Artificial Sequence: Synthetic oligonucleotide
aagtactcaagatgaatttg

SEQ ID NO: 1829 - DNA, 20 bp, Artificial Sequence
  Description of Artificial Sequence: Synthetic oligonucleotide
caatgtctcagaaaaatggt

SEQ ID NO: 1830 - DNA, 20 bp, Artificial Sequence
  Description of Artificial Sequence: Synthetic oligonucleotide
gctcagcttgcctctctgaa

SEQ ID NO: 1831 - DNA, 20 bp, Artificial Sequence
  Description of Artificial Sequence: Synthetic oligonucleotide
tttatcaagactggcatgac

SEQ ID NO: 1832 - DNA, 20 bp, Artificial Sequence
  Description of Artificial Sequence: Synthetic oligonucleotide
atttggccaaagccttgaat

SEQ ID NO: 1833 - DNA, 20 bp, Artificial Sequence
  Description of Artificial Sequence: Synthetic oligonucleotide
ttatcttcaagccactccag

SEQ ID NO: 1834 - DNA, 20 bp, Artificial Sequence
  Description of Artificial Sequence: Synthetic oligonucleotide
cttacttcagtgtcctatgc

SEQ ID NO: 1835 - DNA, 20 bp, Artificial Sequence
  Description of Artificial Sequence: Synthetic oligonucleotide
accccattttgttccgcctc

SEQ ID NO: 1836 - DNA, 20 bp, Artificial Sequence
  Description of Artificial Sequence: Synthetic oligonucleotide
tcacattctaacttgtcttc

SEQ ID NO: 1837 - DNA, 20 bp, Artificial Sequence
  Description of Artificial Sequence: Synthetic oligonucleotide
tgactgtggggtgttttagg

SEQ ID NO: 1838 - DNA, 20 bp, Artificial Sequence
  Description of Artificial Sequence: Synthetic oligonucleotide
gtgactgtggggtgttttag

SEQ ID NO: 1839 - DNA, 20 bp, Artificial Sequence
  Description of Artificial Sequence: Synthetic oligonucleotide
ggtgactgtggggtgtttta

SEQ ID NO: 1840 - DNA, 20 bp, Artificial Sequence
  Description of Artificial Sequence: Synthetic oligonucleotide
aggtgactgtggggtgtttt

SEQ ID NO: 1841 - DNA, 20 bp, Artificial Sequence
  Description of Artificial Sequence: Synthetic oligonucleotide
aatctgagcacagagtggaa

SEQ ID NO: 1842 - DNA, 20 bp, Artificial Sequence
  Description of Artificial Sequence: Synthetic oligonucleotide
tgaagaatctgagcacagag

SEQ ID NO: 1843 - DNA, 20 bp, Artificial Sequence
  Description of Artificial Sequence: Synthetic oligonucleotide
tgattggaccttggggagaa

SEQ ID NO: 1844 - DNA, 20 bp, Artificial Sequence
  Description of Artificial Sequence: Synthetic oligonucleotide
gtggatctgaaagacgaggt

SEQ ID NO: 1845 - DNA, 20 bp, Artificial Sequence
  Description of Artificial Sequence: Synthetic oligonucleotide
cgtggatctgaaagacgagg

SEQ ID NO: 1846 - DNA, 20 bp, Artificial Sequence
  Description of Artificial Sequence: Synthetic oligonucleotide
ctgtacccgcagagcctcag

SEQ ID NO: 1847 - DNA, 20 bp, Artificial Sequence
  Description of Artificial Sequence: Synthetic oligonucleotide
aatcggagcctgagacaaag

SEQ ID NO: 1848 - DNA, 20 bp, Artificial Sequence
  Description of Artificial Sequence: Synthetic oligonucleotide
acttacctcctccccatctt

SEQ ID NO: 1849 - DNA, 20 bp, Artificial Sequence
  Description of Artificial Sequence: Synthetic oligonucleotide
aacctaggagtggagaagac

SEQ ID NO: 1850 - DNA, 20 bp, Artificial Sequence
  Description of Artificial Sequence: Synthetic oligonucleotide
agaggcatcctggagagttc

SEQ ID NO: 1851 - DNA, 20 bp, Artificial Sequence
  Description of Artificial Sequence: Synthetic oligonucleotide
cccacagatctgagaggagg

SEQ ID NO: 1852 - DNA, 20 bp, Artificial Sequence
  Description of Artificial Sequence: Synthetic oligonucleotide
ttaggtctggggacgaagta

SEQ ID NO: 1853 - DNA, 20 bp, Artificial Sequence
  Description of Artificial Sequence: Synthetic oligonucleotide
cttaggtctggggacgaagt

SEQ ID NO: 1854 - DNA, 20 bp, Artificial Sequence
  Description of Artificial Sequence: Synthetic oligonucleotide
tgtggtgctataggaggcca

SEQ ID NO: 1855 - DNA, 20 bp, Artificial Sequence
  Description of Artificial Sequence: Synthetic oligonucleotide
gaccctggaagagttggggc

SEQ ID NO: 1856 - DNA, 20 bp, Artificial Sequence
  Description of Artificial Sequence: Synthetic oligonucleotide
ctgactcctagccacgggat

SEQ ID NO: 1857 - DNA, 20 bp, Artificial Sequence
  Description of Artificial Sequence: Synthetic oligonucleotide
ctgctgcaggacaggaagag

SEQ ID NO: 1858 - DNA, 20 bp, Artificial Sequence
  Description of Artificial Sequence: Synthetic oligonucleotide
acttacctcgcggacattcc

SEQ ID NO: 1859 - DNA, 20 bp, Artificial Sequence
  Description of Artificial Sequence: Synthetic oligonucleotide
aaggttggctgggggagaag

SEQ ID NO: 1860 - DNA, 20 bp, Artificial Sequence
  Description of Artificial Sequence: Synthetic oligonucleotide
aaaggttggctgggggagaa

SEQ ID NO: 1861 - DNA, 20 bp, Artificial Sequence
  Description of Artificial Sequence: Synthetic oligonucleotide
atccctgagggtagacagga

SEQ ID NO: 1862 - DNA, 20 bp, Artificial Sequence
  Description of Artificial Sequence: Synthetic oligonucleotide
tggaatccctgagggtagac

SEQ ID NO: 1863 - DNA, 20 bp, Artificial Sequence
  Description of Artificial Sequence: Synthetic oligonucleotide
gtggtactgaggagagcgag

SEQ ID NO: 1864 - DNA, 20 bp, Artificial Sequence
  Description of Artificial Sequence: Synthetic oligonucleotide
tgtggtactgaggagagcga

SEQ ID NO: 1865 - DNA, 20 bp, Artificial Sequence
  Description of Artificial Sequence: Synthetic oligonucleotide
ctgtggtactgaggagagcg

SEQ ID NO: 1866 - DNA, 20 bp, Artificial Sequence
  Description of Artificial Sequence: Synthetic oligonucleotide
agtactcacctggggcctcc

SEQ ID NO: 1867 - DNA, 20 bp, Artificial Sequence
  Description of Artificial Sequence: Synthetic oligonucleotide
gtattctgcaagggaagcag

SEQ ID NO: 1868 - DNA, 20 bp, Artificial Sequence
  Description of Artificial Sequence: Synthetic oligonucleotide
agtattctgcaagggaagca

SEQ ID NO: 1869 - DNA, 20 bp, Artificial Sequence
  Description of Artificial Sequence: Synthetic oligonucleotide
gagtattctgcaagggaagc

SEQ ID NO: 1870 - DNA, 20 bp, Artificial Sequence
  Description of Artificial Sequence: Synthetic oligonucleotide
ctcctgggagacaaggtgag

SEQ ID NO: 1871 - DNA, 20 bp, Artificial Sequence
  Description of Artificial Sequence: Synthetic oligonucleotide
tttgcaccctggatgggatg

SEQ ID NO: 1872 - DNA, 20 bp, Artificial Sequence
  Description of Artificial Sequence: Synthetic oligonucleotide
agcctgggctcatgggaaga

SEQ ID NO: 1873 - DNA, 20 bp, Artificial Sequence
  Description of Artificial Sequence: Synthetic oligonucleotide
gcttaccccaccccagttga

SEQ ID NO: 1874 - DNA, 20 bp, Artificial Sequence
  Description of Artificial Sequence: Synthetic oligonucleotide
tgcttaccccaccccagttg

SEQ ID NO: 1875 - DNA, 20 bp, Artificial Sequence
  Description of Artificial Sequence: Synthetic oligonucleotide
tagccctgggggagcaggca

SEQ ID NO: 1876 - DNA, 20 bp, Artificial Sequence
  Description of Artificial Sequence: Synthetic oligonucleotide
gtagccctgggggagcaggc

SEQ ID NO: 1877 - DNA, 20 bp, Artificial Sequence
  Description of Artificial Sequence: Synthetic oligonucleotide
ggcaactggaaaaaggtcaa

SEQ ID NO: 1878 - DNA, 20 bp, Artificial Sequence
  Description of Artificial Sequence: Synthetic oligonucleotide
gggcaactggaaaaaggtca

SEQ ID NO: 1879 - DNA, 20 bp, Artificial Sequence
  Description of Artificial Sequence: Synthetic oligonucleotide
gctgccaacctcgagactcg

SEQ ID NO: 1880 - DNA, 20 bp, Artificial Sequence
  Description of Artificial Sequence: Synthetic oligonucleotide
agctgtctgtgggagacaga

SEQ ID NO: 1881 - DNA, 20 bp, Artificial Sequence
  Description of Artificial Sequence: Synthetic oligonucleotide
aagctgtctgtgggagacag

SEQ ID NO: 1882 - DNA, 20 bp, Artificial Sequence
  Description of Artificial Sequence: Synthetic oligonucleotide
ctcctcacctggggatgttc

SEQ ID NO: 1883 - DNA, 20 bp, Artificial Sequence
  Description of Artificial Sequence: Synthetic oligonucleotide
cccactcaccaacgacgtca

SEQ ID NO: 1884 - DNA, 20 bp, Artificial Sequence
  Description of Artificial Sequence: Synthetic oligonucleotide
gtactcgctgtgcagggggg

SEQ ID NO: 1885 - DNA, 20 bp, Artificial Sequence
  Description of Artificial Sequence: Synthetic oligonucleotide
gacgtactcgctgtgcaggg

SEQ ID NO: 1886 - DNA, 20 bp, Artificial Sequence
  Description of Artificial Sequence: Synthetic oligonucleotide
ggacgtactcgctgtgcagg

SEQ ID NO: 1887 - DNA, 20 bp, Artificial Sequence
  Description of Artificial Sequence: Synthetic oligonucleotide
gggacgtactcgctgtgcag

SEQ ID NO: 1888 - DNA, 20 bp, Artificial Sequence
  Description of Artificial Sequence: Synthetic oligonucleotide
tgctggctgtcgggcagggc

SEQ ID NO: 1889 - DNA, 20 bp, Artificial Sequence
  Description of Artificial Sequence: Synthetic oligonucleotide
gctcctgttgagagaagcaa

SEQ ID NO: 1890 - DNA, 20 bp, Artificial Sequence
  Description of Artificial Sequence: Synthetic oligonucleotide
agtggtggctgtgggagaga

SEQ ID NO: 1891 - DNA, 20 bp, Artificial Sequence
  Description of Artificial Sequence: Synthetic oligonucleotide
gctcctgtggggggaggtca

SEQ ID NO: 1892 - DNA, 20 bp, Artificial Sequence
  Description of Artificial Sequence: Synthetic oligonucleotide
tgctcctgtggggggaggtc

SEQ ID NO: 1893 - DNA, 20 bp, Artificial Sequence
  Description of Artificial Sequence: Synthetic oligonucleotide
tcaccggggcgtgggtgagc

SEQ ID NO: 1894 - DNA, 20 bp, Artificial Sequence
  Description of Artificial Sequence: Synthetic oligonucleotide
ggagctgagggcaggaggca

SEQ ID NO: 1895 - DNA, 20 bp, Artificial Sequence
  Description of Artificial Sequence: Synthetic oligonucleotide
ccggctcaccgtggtccagc

SEQ ID NO: 1896 - DNA, 20 bp, Artificial Sequence
  Description of Artificial Sequence: Synthetic oligonucleotide
gggggctggagaaggggagg

SEQ ID NO: 1897 - DNA, 20 bp, Artificial Sequence
  Description of Artificial Sequence: Synthetic oligonucleotide
tgggggggctggagaagggg

SEQ ID NO: 1898 - DNA, 20 bp, Artificial Sequence
  Description of Artificial Sequence: Synthetic oligonucleotide
cccgctgggggagcaggggc

SEQ ID NO: 1899 - DNA, 20 bp, Artificial Sequence
  Description of Artificial Sequence: Synthetic oligonucleotide
tctccccgctgggggagcag

SEQ ID NO: 1900 - DNA, 20 bp, Artificial Sequence
  Description of Artificial Sequence: Synthetic oligonucleotide
acactggaggcgggcgggga

SEQ ID NO: 1901 - DNA, 20 bp, Artificial Sequence
  Description of Artificial Sequence: Synthetic oligonucleotide
cacactggaggcgggcgggg

SEQ ID NO: 1902 - DNA, 20 bp, Artificial Sequence
  Description of Artificial Sequence: Synthetic oligonucleotide
catcacactggaggcgggcg

SEQ ID NO: 1903 - DNA, 20 bp, Artificial Sequence
  Description of Artificial Sequence: Synthetic oligonucleotide
ctacgcgagcagggcgctcc

SEQ ID NO: 1904 - DNA, 20 bp, Artificial Sequence
  Description of Artificial Sequence: Synthetic oligonucleotide
tggctgttgggcacagagac

SEQ ID NO: 1905 - DNA, 20 bp, Artificial Sequence
  Description of Artificial Sequence: Synthetic oligonucleotide
actgacttctgctgcaggac

SEQ ID NO: 1906 - DNA, 20 bp, Artificial Sequence
  Description of Artificial Sequence: Synthetic oligonucleotide
tccccatggcgactaggcca

SEQ ID NO: 1907 - DNA, 20 bp, Artificial Sequence
  Description of Artificial Sequence: Synthetic oligonucleotide
ttccccatggcgactaggcc

SEQ ID NO: 1908 - DNA, 20 bp, Artificial Sequence
  Description of Artificial Sequence: Synthetic oligonucleotide
gaacctgcatttccggggag

SEQ ID NO: 1909 - DNA, 20 bp, Artificial Sequence
  Description of Artificial Sequence: Synthetic oligonucleotide
gtggcgaacctgcatttccg

SEQ ID NO: 1910 - DNA, 20 bp, Artificial Sequence
  Description of Artificial Sequence: Synthetic oligonucleotide
tcactgggggaggaagaaca

SEQ ID NO: 1911 - DNA, 20 bp, Artificial Sequence
  Description of Artificial Sequence: Synthetic oligonucleotide
accctgtatgggcagagttc

SEQ ID NO: 1912 - DNA, 20 bp, Artificial Sequence
  Description of Artificial Sequence: Synthetic oligonucleotide
gaccctgtatgggcagagtt

SEQ ID NO: 1913 - DNA, 20 bp, Artificial Sequence
  Description of Artificial Sequence: Synthetic oligonucleotide
aagtcctggggggaggtccg

SEQ ID NO: 1914 - DNA, 20 bp, Artificial Sequence
  Description of Artificial Sequence: Synthetic oligonucleotide
gaagtcctggggggaggtcc

SEQ ID NO: 1915 - DNA, 20 bp, Artificial Sequence
  Description of Artificial Sequence: Synthetic oligonucleotide
ggaagtcctggggggaggtc

SEQ ID NO: 1916 - DNA, 20 bp, Artificial Sequence
  Description of Artificial Sequence: Synthetic oligonucleotide
aggttcctctgcaaaaggac

SEQ ID NO: 1917 - DNA, 20 bp, Artificial Sequence
  Description of Artificial Sequence: Synthetic oligonucleotide
gttaccttgatgaccggcgg

SEQ ID NO: 1918 - DNA, 20 bp, Artificial Sequence
  Description of Artificial Sequence: Synthetic oligonucleotide
tgtgttaccttgatgaccgg

SEQ ID NO: 1919 - DNA, 20 bp, Artificial Sequence
  Description of Artificial Sequence: Synthetic oligonucleotide
cacctgtgggacgcccagga

SEQ ID NO: 1920 - DNA, 20 bp, Artificial Sequence
  Description of Artificial Sequence: Synthetic oligonucleotide
attccacctgtgggacgccc

SEQ ID NO: 1921 - DNA, 20 bp, Artificial Sequence
  Description of Artificial Sequence: Synthetic oligonucleotide
cctcacctgcgggcagcatc

SEQ ID NO: 1922 - DNA, 20 bp, Artificial Sequence
  Description of Artificial Sequence: Synthetic oligonucleotide
atgccacctgtggaaagaat

SEQ ID NO: 1923 - DNA, 20 bp, Artificial Sequence
  Description of Artificial Sequence: Synthetic oligonucleotide
gatgccacctgtggaaagaa

SEQ ID NO: 1924 - DNA, 20 bp, Artificial Sequence
  Description of Artificial Sequence: Synthetic oligonucleotide
tttaccttgtggccgggctc

SEQ ID NO: 1925 - DNA, 20 bp, Artificial Sequence
  Description of Artificial Sequence: Synthetic oligonucleotide
tttctgggagaggggcaggt

SEQ ID NO: 1926 - DNA, 20 bp, Artificial Sequence
  Description of Artificial Sequence: Synthetic oligonucleotide
tccttttctgggagaggggc

SEQ ID NO: 1927 - DNA, 20 bp, Artificial Sequence
  Description of Artificial Sequence: Synthetic oligonucleotide
ctcacctggagggaaagcag

SEQ ID NO: 1928 - DNA, 20 bp, Artificial Sequence
  Description of Artificial Sequence: Synthetic oligonucleotide
ttacctgtgcttgcttctct

SEQ ID NO: 1929 - DNA, 20 bp, Artificial Sequence
  Description of Artificial Sequence: Synthetic oligonucleotide
gttacctgtgcttgcttctc

SEQ ID NO: 1930 - DNA, 20 bp, Artificial Sequence
  Description of Artificial Sequence: Synthetic oligonucleotide
aagacctaggattcggggaa

SEQ ID NO: 1931 - DNA, 20 bp, Artificial Sequence
  Description of Artificial Sequence: Synthetic oligonucleotide
aaagacctaggattcgggga

SEQ ID NO: 1932 - DNA, 20 bp, Artificial Sequence
  Description of Artificial Sequence: Synthetic oligonucleotide
acccacctgtagcagtggcc

SEQ ID NO: 1933 - DNA, 20 bp, Artificial Sequence
  Description of Artificial Sequence: Synthetic oligonucleotide
gacccacctgtagcagtggc

SEQ ID NO: 1934 - DNA, 20 bp, Artificial Sequence
  Description of Artificial Sequence: Synthetic oligonucleotide
agcctggatggagagaaacc

SEQ ID NO: 1935 - DNA, 20 bp, Artificial Sequence
  Description of Artificial Sequence: Synthetic oligonucleotide
cagcctggatggagagaaac

SEQ ID NO: 1936 - DNA, 20 bp, Artificial Sequence
  Description of Artificial Sequence: Synthetic oligonucleotide
ccttacctttctgctttctg

SEQ ID NO: 1937 - DNA, 20 bp, Artificial Sequence
  Description of Artificial Sequence: Synthetic oligonucleotide
gccttacctttctgctttct

SEQ ID NO: 1938 - DNA, 20 bp, Artificial Sequence
  Description of Artificial Sequence: Synthetic oligonucleotide
ggccttacctttctgctttc

SEQ ID NO: 1939 - DNA, 20 bp, Artificial Sequence
  Description of Artificial Sequence: Synthetic oligonucleotide
caccctggagatggaggtgg

SEQ ID NO: 1940 - DNA, 20 bp, Artificial Sequence
  Description of Artificial Sequence: Synthetic oligonucleotide
cttcaccctggagatggagg

SEQ ID NO: 1941 - DNA, 20 bp, Artificial Sequence
  Description of Artificial Sequence: Synthetic oligonucleotide
acaaacccagcagcaccatg

SEQ ID NO: 1942 - DNA, 20 bp, Artificial Sequence
  Description of Artificial Sequence: Synthetic oligonucleotide
gcgcctggggaacgaagagg

SEQ ID NO: 1943 - DNA, 20 bp, Artificial Sequence
  Description of Artificial Sequence: Synthetic oligonucleotide
ggcgcctggggaacgaagag

SEQ ID NO: 1944 - DNA, 20 bp, Artificial Sequence
  Description of Artificial Sequence: Synthetic oligonucleotide
cggcgcctggggaacgaaga

SEQ ID NO: 1945 - DNA, 20 bp, Artificial Sequence
  Description of Artificial Sequence: Synthetic oligonucleotide
acggcgcctggggaacgaag

SEQ ID NO: 1946 - DNA, 20 bp, Artificial Sequence
  Description of Artificial Sequence: Synthetic oligonucleotide
ccgtacctgcggtggtcagc

SEQ ID NO: 1947 - DNA, 20 bp, Artificial Sequence
  Description of Artificial Sequence: Synthetic oligonucleotide
agacgcctgggggccggggg

SEQ ID NO: 1948 - DNA, 20 bp, Artificial Sequence
  Description of Artificial Sequence: Synthetic oligonucleotide
actcacagaacacgctggcc

SEQ ID NO: 1949 - DNA, 20 bp, Artificial Sequence
  Description of Artificial Sequence: Synthetic oligonucleotide
cacctacctgcccttccagc

SEQ ID NO: 1950 - DNA, 20 bp, Artificial Sequence
  Description of Artificial Sequence: Synthetic oligonucleotide
aagacctgatgagagaccac

SEQ ID NO: 1951 - DNA, 20 bp, Artificial Sequence
  Description of Artificial Sequence: Synthetic oligonucleotide
gcaggtctgcaggggaggga

SEQ ID NO: 1952 - DNA, 20 bp, Artificial Sequence
  Description of Artificial Sequence: Synthetic oligonucleotide
acgtcctgggggcggcgggc

SEQ ID NO: 1953 - DNA, 20 bp, Artificial Sequence
  Description of Artificial Sequence: Synthetic oligonucleotide
gtcatcctgaggagagaagc

SEQ ID NO: 1954 - DNA, 20 bp, Artificial Sequence
  Description of Artificial Sequence: Synthetic oligonucleotide
tcactgcacggcttgttcat

SEQ ID NO: 1955 - DNA, 20 bp, Artificial Sequence
  Description of Artificial Sequence: Synthetic oligonucleotide
atgcaggctatgggggtggg

SEQ ID NO: 1956 - DNA, 20 bp, Artificial Sequence
  Description of Artificial Sequence: Synthetic oligonucleotide
catgcaggctatgggggtgg

SEQ ID NO: 1957 - DNA, 20 bp, Artificial Sequence
  Description of Artificial Sequence: Synthetic oligonucleotide
gtctttttcattgactagaa

SEQ ID NO: 1958 - DNA, 20 bp, Artificial Sequence
  Description of Artificial Sequence: Synthetic oligonucleotide
tgacttaccttaacgttttc

SEQ ID NO: 1959 - DNA, 20 bp, Artificial Sequence
  Description of Artificial Sequence: Synthetic oligonucleotide
tgcatcaagtagaagaatgc

SEQ ID NO: 1960 - DNA, 20 bp, Artificial Sequence
  Description of Artificial Sequence: Synthetic oligonucleotide
ctctttccatgcaatcagtc

SEQ ID NO: 1961 - DNA, 20 bp, Artificial Sequence
  Description of Artificial Sequence: Synthetic oligonucleotide
gttcagaaagtaaatgaaat

SEQ ID NO: 1962 - DNA, 20 bp, Artificial Sequence
  Description of Artificial Sequence: Synthetic oligonucleotide
tcactttccatcctgtacaa

SEQ ID NO: 1963 - DNA, 20 bp, Artificial Sequence
  Description of Artificial Sequence: Synthetic oligonucleotide
ggccaagaggaaggtgccta

SEQ ID NO: 1964 - DNA, 20 bp, Artificial Sequence
  Description of Artificial Sequence: Synthetic oligonucleotide
gctctgcaatttcgcctcta

SEQ ID NO: 1965 - DNA, 20 bp, Artificial Sequence
  Description of Artificial Sequence: Synthetic oligonucleotide
actctggcagaaactggcca

SEQ ID NO: 1966 - DNA, 20 bp, Artificial Sequence
  Description of Artificial Sequence: Synthetic oligonucleotide
tatacttgcctgaatgtcct

SEQ ID NO: 1967 - DNA, 20 bp, Artificial Sequence
  Description of Artificial Sequence: Synthetic oligonucleotide
aacttaccccaaaatccccc

SEQ ID NO: 1968 - DNA, 20 bp, Artificial Sequence
  Description of Artificial Sequence: Synthetic oligonucleotide
ctgtgctcagccttgggagg

SEQ ID NO: 1969 - DNA, 20 bp, Artificial Sequence
  Description of Artificial Sequence: Synthetic oligonucleotide
ttttatctagaagtgaagtg

SEQ ID NO: 1970 - DNA, 20 bp, Artificial Sequence
  Description of Artificial Sequence: Synthetic oligonucleotide
tttatctagaagtgaagtga

SEQ ID NO: 1971 - DNA, 20 bp, Artificial Sequence
  Description of Artificial Sequence: Synthetic oligonucleotide
ttatctagaagtgaagtgag

SEQ ID NO: 1972 - DNA, 20 bp, Artificial Sequence
  Description of Artificial Sequence: Synthetic oligonucleotide
tatctagaagtgaagtgagg

SEQ ID NO: 1973 - DNA, 20 bp, Artificial Sequence
  Description of Artificial Sequence: Synthetic oligonucleotide
aaattaccttgccaatgaaa

SEQ ID NO: 1974 - DNA, 20 bp, Artificial Sequence
  Description of Artificial Sequence: Synthetic oligonucleotide
cccaccttcttccccaggcg

SEQ ID NO: 1975 - DNA, 20 bp, Artificial Sequence
  Description of Artificial Sequence: Synthetic oligonucleotide
gagcagaacgacctggagcc

SEQ ID NO: 1976 - DNA, 20 bp, Artificial Sequence
  Description of Artificial Sequence: Synthetic oligonucleotide
gtcctgccagatgaacctgg

SEQ ID NO: 1977 - DNA, 20 bp, Artificial Sequence
  Description of Artificial Sequence: Synthetic oligonucleotide
cctggtacaagaggttcagc

SEQ ID NO: 1978 - DNA, 20 bp, Artificial Sequence
  Description of Artificial Sequence: Synthetic oligonucleotide
gtgacctccagaacaggagt

SEQ ID NO: 1979 - DNA, 20 bp, Artificial Sequence
  Description of Artificial Sequence: Synthetic oligonucleotide
tgacctccagaacaggagtg

SEQ ID NO: 1980 - DNA, 20 bp, Artificial Sequence
  Description of Artificial Sequence: Synthetic oligonucleotide
gttccatgacatcggggaca

SEQ ID NO: 1981 - DNA, 20 bp, Artificial Sequence
  Description of Artificial Sequence: Synthetic oligonucleotide
ggagttcatagctgggctcc

SEQ ID NO: 1982 - DNA, 20 bp, Artificial Sequence
  Description of Artificial Sequence: Synthetic oligonucleotide
cctacccacctcctttctca

SEQ ID NO: 1983 - DNA, 20 bp, Artificial Sequence
  Description of Artificial Sequence: Synthetic oligonucleotide
gtacctcattgaatccagat

SEQ ID NO: 1984 - DNA, 20 bp, Artificial Sequence
  Description of Artificial Sequence: Synthetic oligonucleotide
cttccaatctggattcaatg

SEQ ID NO: 1985 - DNA, 20 bp, Artificial Sequence
  Description of Artificial Sequence: Synthetic oligonucleotide
ctcctaagaggaaagatggt

SEQ ID NO: 1986 - DNA, 20 bp, Artificial Sequence
  Description of Artificial Sequence: Synthetic oligonucleotide
tctcctaagaggaaagatgg

SEQ ID NO: 1987 - DNA, 20 bp, Artificial Sequence
  Description of Artificial Sequence: Synthetic oligonucleotide
aagtctcctaagaggaaaga

SEQ ID NO: 1988 - DNA, 20 bp, Artificial Sequence
  Description of Artificial Sequence: Synthetic oligonucleotide
ccacctttttctgcaggaac

SEQ ID NO: 1989 - DNA, 20 bp, Artificial Sequence
  Description of Artificial Sequence: Synthetic oligonucleotide
agctgcaggcacagaaccag

SEQ ID NO: 1990 - DNA, 20 bp, Artificial Sequence
  Description of Artificial Sequence: Synthetic oligonucleotide
ggcacagaaccagtggctgc

SEQ ID NO: 1991 - DNA, 20 bp, Artificial Sequence
  Description of Artificial Sequence: Synthetic oligonucleotide
gttcctgcagtccagcctga

SEQ ID NO: 1992 - DNA, 20 bp, Artificial Sequence
  Description of Artificial Sequence: Synthetic oligonucleotide
tgggggtactggggcaggga

SEQ ID NO: 1993 - DNA, 20 bp, Artificial Sequence
  Description of Artificial Sequence: Synthetic oligonucleotide
attccctcaacttggtgtgg

SEQ ID NO: 1994 - DNA, 20 bp, Artificial Sequence
  Description of Artificial Sequence: Synthetic oligonucleotide
cggccagcatgcttcctcct

SEQ ID NO: 1995 - DNA, 20 bp, Artificial Sequence
  Description of Artificial Sequence: Synthetic oligonucleotide
tgactgttagacacaaaaca

SEQ ID NO: 1996 - DNA, 20 bp, Artificial Sequence
  Description of Artificial Sequence: Synthetic oligonucleotide
ctcctgccagttagcagtcc

SEQ ID NO: 1997 - DNA, 20 bp, Artificial Sequence
  Description of Artificial Sequence: Synthetic oligonucleotide
actcaaacctttcagggttg

SEQ ID NO: 1998 - DNA, 20 bp, Artificial Sequence
  Description of Artificial Sequence: Synthetic oligonucleotide
cctggcaagacccccactcc

SEQ ID NO: 1999 - DNA, 20 bp, Artificial Sequence
  Description of Artificial Sequence: Synthetic oligonucleotide
ttgacctgagggcgggggca

SEQ ID NO: 2000 - DNA, 20 bp, Artificial Sequence
  Description of Artificial Sequence: Synthetic oligonucleotide
cgtggtgcagcttcgtgccc

SEQ ID NO: 2001 - DNA, 20 bp, Artificial Sequence
  Description of Artificial Sequence: Synthetic oligonucleotide
acctgtccaaggcgtgccca

SEQ ID NO: 2002 - DNA, 20 bp, Artificial Sequence
  Description of Artificial Sequence: Synthetic oligonucleotide
ctgggtcccaaatgccaccc

SEQ ID NO: 2003 - DNA, 20 bp, Artificial Sequence
  Description of Artificial Sequence: Synthetic oligonucleotide
ggattctgcggacagaagaa

SEQ ID NO: 2004 - DNA, 20 bp, Artificial Sequence
  Description of Artificial Sequence: Synthetic oligonucleotide
ggagctcacctgcatggggg

SEQ ID NO: 2005 - DNA, 20 bp, Artificial Sequence
  Description of Artificial Sequence: Synthetic oligonucleotide
tttgctgcaggaagaacaaa

SEQ ID NO: 2006 - DNA, 20 bp, Artificial Sequence
  Description of Artificial Sequence: Synthetic oligonucleotide
gcagcaaatgaaggatcagc

SEQ ID NO: 2007 - DNA, 20 bp, Artificial Sequence
  Description of Artificial Sequence: Synthetic oligonucleotide
accctaagggcaggagccaa

SEQ ID NO: 2008 - DNA, 20 bp, Artificial Sequence
  Description of Artificial Sequence: Synthetic oligonucleotide
gatgatccagttttacctgg

SEQ ID NO: 2009 - DNA, 20 bp, Artificial Sequence
  Description of Artificial Sequence: Synthetic oligonucleotide
gaaccaagacccagacatca

SEQ ID NO: 2010 - DNA, 20 bp, Artificial Sequence
  Description of Artificial Sequence: Synthetic oligonucleotide
ccaggcagtgtgagtcagct

SEQ ID NO: 2011 - DNA, 20 bp, Artificial Sequence
  Description of Artificial Sequence: Synthetic oligonucleotide
tggccctccagctgtatgtg

SEQ ID NO: 2012 - DNA, 20 bp, Artificial Sequence
  Description of Artificial Sequence: Synthetic oligonucleotide
cttcaaaccacacagacgga

SEQ ID NO: 2013 - DNA, 20 bp, Artificial Sequence
  Description of Artificial Sequence: Synthetic oligonucleotide
tgggtgtccagtggaggatg

SEQ ID NO: 2014 - DNA, 20 bp, Artificial Sequence
  Description of Artificial Sequence: Synthetic oligonucleotide
gcttcaaaccacacagacgg

SEQ ID NO: 2015 - DNA, 20 bp, Artificial Sequence
  Description of Artificial Sequence: Synthetic oligonucleotide
tccatacctgaggagatacc

SEQ ID NO: 2016 - DNA, 20 bp, Artificial Sequence
  Description of Artificial Sequence: Synthetic oligonucleotide
tgacggtccagttggagtgc

SEQ ID NO: 2017 - DNA, 20 bp, Artificial Sequence
  Description of Artificial Sequence: Synthetic oligonucleotide
ccccataccgtgaagtttcc

SEQ ID NO: 2018 - DNA, 20 bp, Artificial Sequence
  Description of Artificial Sequence: Synthetic oligonucleotide
tgactcacactgcctggtga

SEQ ID NO: 2019 - DNA, 20 bp, Artificial Sequence
  Description of Artificial Sequence: Synthetic oligonucleotide
ctgactcacactgcctggtg

SEQ ID NO: 2020 - DNA, 20 bp, Artificial Sequence
  Description of Artificial Sequence: Synthetic oligonucleotide
accaggcagtgtgagtcagc

SEQ ID NO: 2021 - DNA, 20 bp, Artificial Sequence
  Description of Artificial Sequence: Synthetic oligonucleotide
ttgaagagctggggaagaga

SEQ ID NO: 2022 - DNA, 20 bp, Artificial Sequence
  Description of Artificial Sequence: Synthetic oligonucleotide
agctccagtcagatattccc

SEQ ID NO: 2023 - DNA, 20 bp, Artificial Sequence
  Description of Artificial Sequence: Synthetic oligonucleotide
agttcaaaactctgagggcc

SEQ ID NO: 2024 - DNA, 20 bp, Artificial Sequence
  Description of Artificial Sequence: Synthetic oligonucleotide
tagttcaaaactctgagggc

SEQ ID NO: 2025 - DNA, 20 bp, Artificial Sequence
  Description of Artificial Sequence: Synthetic oligonucleotide
ctggttccactgtcccgttg

SEQ ID NO: 2026 - DNA, 20 bp, Artificial Sequence
  Description of Artificial Sequence: Synthetic oligonucleotide
gctggttccactgtcccgtt

SEQ ID NO: 2027 - DNA, 20 bp, Artificial Sequence
  Description of Artificial Sequence: Synthetic oligonucleotide
tggcattccagggttacctg

SEQ ID NO: 2028 - DNA, 20 bp, Artificial Sequence
  Description of Artificial Sequence: Synthetic oligonucleotide
ggctggttccactgtcccgt

SEQ ID NO: 2029 - DNA, 20 bp, Artificial Sequence
  Description of Artificial Sequence: Synthetic oligonucleotide
gccggagaccttgaagagcg

SEQ ID NO: 2030 - DNA, 20 bp, Artificial Sequence
  Description of Artificial Sequence: Synthetic oligonucleotide
ggcggccgaggcggagagtt

SEQ ID NO: 2031 - DNA, 20 bp, Artificial Sequence
  Description of Artificial Sequence: Synthetic oligonucleotide
cgttctcccacaccagcccg

SEQ ID NO: 2032 - DNA, 20 bp, Artificial Sequence
  Description of Artificial Sequence: Synthetic oligonucleotide
cgcggttgtagtcctgcttg

SEQ ID NO: 2033 - DNA, 20 bp, Artificial Sequence
  Description of Artificial Sequence: Synthetic oligonucleotide
ctaccttttttggctccctc

SEQ ID NO: 2034 - DNA, 20 bp, Artificial Sequence
  Description of Artificial Sequence: Synthetic oligonucleotide
gtcttccaggtgggagggtc

SEQ ID NO: 2035 - DNA, 20 bp, Artificial Sequence
  Description of Artificial Sequence: Synthetic oligonucleotide
ctcctacatgtttggggaaa

SEQ ID NO: 2036 - DNA, 20 bp, Artificial Sequence
  Description of Artificial Sequence: Synthetic oligonucleotide
atacctgggctgggagcgaa

SEQ ID NO: 2037 - DNA, 20 bp, Artificial Sequence
  Description of Artificial Sequence: Synthetic oligonucleotide
catacctgggctgggagcga

SEQ ID NO: 2038 - DNA, 20 bp, Artificial Sequence
  Description of Artificial Sequence: Synthetic oligonucleotide
agccaagcagctcaccctgg

SEQ ID NO: 2039 - DNA, 20 bp, Artificial Sequence
  Description of Artificial Sequence: Synthetic oligonucleotide
cccagcccaggtatggtgga

SEQ ID NO: 2040 - DNA, 20 bp, Artificial Sequence
  Description of Artificial Sequence: Synthetic oligonucleotide
ctgctaaaggagtgcaggag

SEQ ID NO: 2041 - DNA, 20 bp, Artificial Sequence
  Description of Artificial Sequence: Synthetic oligonucleotide
tccttaccattttcacaagc

SEQ ID NO: 2042 - DNA, 20 bp, Artificial Sequence
  Description of Artificial Sequence: Synthetic oligonucleotide
ccttaccattttcacaagct

SEQ ID NO: 2043 - DNA, 20 bp, Artificial Sequence
  Description of Artificial Sequence: Synthetic oligonucleotide
agtccctccagcttcggtcg

SEQ ID NO: 2044 - DNA, 20 bp, Artificial Sequence
  Description of Artificial Sequence: Synthetic oligonucleotide
gtccctccagcttcggtcga

SEQ ID NO: 2045 - DNA, 20 bp, Artificial Sequence
  Description of Artificial Sequence: Synthetic oligonucleotide
tccctccagcttcggtcgag

SEQ ID NO: 2046 - DNA, 20 bp, Artificial Sequence
  Description of Artificial Sequence: Synthetic oligonucleotide
taccaatgtcccatgacgtt

SEQ ID NO: 2047 - DNA, 20 bp, Artificial Sequence
  Description of Artificial Sequence: Synthetic oligonucleotide
gccttgccagtggtggccgc

SEQ ID NO: 2048 - DNA, 20 bp, Artificial Sequence
  Description of Artificial Sequence: Synthetic oligonucleotide
ccttgccagtggtggccgcg

SEQ ID NO: 2049 - DNA, 20 bp, Artificial Sequence
  Description of Artificial Sequence: Synthetic oligonucleotide
gcactcacctgagaacgcca

SEQ ID NO: 2050 - DNA, 20 bp, Artificial Sequence
  Description of Artificial Sequence: Synthetic oligonucleotide
agtctgcaaacacagagctc

SEQ ID NO: 2051 - DNA, 20 bp, Artificial Sequence
  Description of Artificial Sequence: Synthetic oligonucleotide
tgtgccagagcaggatctac

SEQ ID NO: 2052 - DNA, 20 bp, Artificial Sequence
  Description of Artificial Sequence: Synthetic oligonucleotide
gtgccagagcaggatctact

SEQ ID NO: 2053 - DNA, 20 bp, Artificial Sequence
  Description of Artificial Sequence: Synthetic oligonucleotide
gacacacagcagttcttgtc

SEQ ID NO: 2054 - DNA, 20 bp, Artificial Sequence
  Description of Artificial Sequence: Synthetic oligonucleotide
ctgcaagcgtttgctcacca

SEQ ID NO: 2055 - DNA, 20 bp, Artificial Sequence
  Description of Artificial Sequence: Synthetic oligonucleotide
ttccaggtgactctatgctt

SEQ ID NO: 2056 - DNA, 20 bp, Artificial Sequence
  Description of Artificial Sequence: Synthetic oligonucleotide
ccttctcatggcaggtgtcc

SEQ ID NO: 2057 - DNA, 20 bp, Artificial Sequence
  Description of Artificial Sequence: Synthetic oligonucleotide
cccacagattcagggactcc

SEQ ID NO: 2058 - DNA, 20 bp, Artificial Sequence
  Description of Artificial Sequence: Synthetic oligonucleotide
acccacagattcagggactc

SEQ ID NO: 2059 - DNA, 20 bp, Artificial Sequence
  Description of Artificial Sequence: Synthetic oligonucleotide
gctctttaccttaaaaatgg

SEQ ID NO: 2060 - DNA, 20 bp, Artificial Sequence
  Description of Artificial Sequence: Synthetic oligonucleotide
ttacatttttgctcttcctc

SEQ ID NO: 2061 - DNA, 20 bp, Artificial Sequence
  Description of Artificial Sequence: Synthetic oligonucleotide
gaaggctgcacagtcagggg

SEQ ID NO: 2062 - DNA, 20 bp, Artificial Sequence
  Description of Artificial Sequence: Synthetic oligonucleotide
aaggctgcacagtcagggga

SEQ ID NO: 2063 - DNA, 20 bp, Artificial Sequence
  Description of Artificial Sequence: Synthetic oligonucleotide
acagaaggctgcacagtcag

SEQ ID NO: 2064 - DNA, 20 bp, Artificial Sequence
  Description of Artificial Sequence: Synthetic oligonucleotide
caccatctgggagaatgctg

SEQ ID NO: 2065 - DNA, 20 bp, Artificial Sequence
  Description of Artificial Sequence: Synthetic oligonucleotide
ggagaatgctgtggacaaga

SEQ ID NO: 2066 - DNA, 20 bp, Artificial Sequence
  Description of Artificial Sequence: Synthetic oligonucleotide
ggtacagacctcggaagaac

SEQ ID NO: 2067 - DNA, 20 bp, Artificial Sequence
  Description of Artificial Sequence: Synthetic oligonucleotide
cagacctcggaagaactggc

SEQ ID NO: 2068 - DNA, 20 bp, Artificial Sequence
  Description of Artificial Sequence: Synthetic oligonucleotide
ctgcagctctggaatgacac

SEQ ID NO: 2069 - DNA, 20 bp, Artificial Sequence
  Description of Artificial Sequence: Synthetic oligonucleotide
gcacatccgggcggcccagg

SEQ ID NO: 2070 - DNA, 20 bp, Artificial Sequence
  Description of Artificial Sequence: Synthetic oligonucleotide
ggatacggccgggcccctgg

SEQ ID NO: 2071 - DNA, 20 bp, Artificial Sequence
  Description of Artificial Sequence: Synthetic oligonucleotide
tctggtcagggctcggacac

SEQ ID NO: 2072 - DNA, 20 bp, Artificial Sequence
  Description of Artificial Sequence: Synthetic oligonucleotide
ggacagtacttttacccccg

SEQ ID NO: 2073 - DNA, 20 bp, Artificial Sequence
  Description of Artificial Sequence: Synthetic oligonucleotide
gagcaggagggcttcgccga

SEQ ID NO: 2074 - DNA, 20 bp, Artificial Sequence
  Description of Artificial Sequence: Synthetic oligonucleotide
gcgcagctgggcttgggccg

SEQ ID NO: 2075 - DNA, 20 bp, Artificial Sequence
  Description of Artificial Sequence: Synthetic oligonucleotide
ggaaccgcagaccgtgccgg

SEQ ID NO: 2076 - DNA, 20 bp, Artificial Sequence
  Description of Artificial Sequence: Synthetic oligonucleotide
cagccgggacgccacgccgc

SEQ ID NO: 2077 - DNA, 20 bp, Artificial Sequence
  Description of Artificial Sequence: Synthetic oligonucleotide
agaccaagagcgcatcaaag

SEQ ID NO: 2078 - DNA, 20 bp, Artificial Sequence
  Description of Artificial Sequence: Synthetic oligonucleotide
caagcggctgcggaaccggc

SEQ ID NO: 2079 - DNA, 20 bp, Artificial Sequence
  Description of Artificial Sequence: Synthetic oligonucleotide
gcggctgcggaaccggctgg

SEQ ID NO: 2080 - DNA, 20 bp, Artificial Sequence
  Description of Artificial Sequence: Synthetic oligonucleotide
tctctttccatcttctgtcg

SEQ ID NO: 2081 - DNA, 20 bp, Artificial Sequence
  Description of Artificial Sequence: Synthetic oligonucleotide
atgacttaccctcctgcgtg

SEQ ID NO: 2082 - DNA, 20 bp, Artificial Sequence
  Description of Artificial Sequence: Synthetic oligonucleotide
cttaccctcctgcgtgtgga

SEQ ID NO: 2083 - DNA, 20 bp, Artificial Sequence
  Description of Artificial Sequence: Synthetic oligonucleotide
tggggttcaaacattccgcc

SEQ ID NO: 2084 - DNA, 20 bp, Artificial Sequence
  Description of Artificial Sequence: Synthetic oligonucleotide
agctttctgtaaacaggggc

SEQ ID NO: 2085 - DNA, 20 bp, Artificial Sequence
  Description of Artificial Sequence: Synthetic oligonucleotide
tactgaccagctgaggagcc

SEQ ID NO: 2086 - DNA, 20 bp, Artificial Sequence
  Description of Artificial Sequence: Synthetic oligonucleotide
ctactgaccagctgaggagc

SEQ ID NO: 2087 - DNA, 20 bp, Artificial Sequence
  Description of Artificial Sequence: Synthetic oligonucleotide
catctaagaaagacagaaac

SEQ ID NO: 2088 - DNA, 20 bp, Artificial Sequence
  Description of Artificial Sequence: Synthetic oligonucleotide
gggggccctaaggacagtcg

SEQ ID NO: 2089 - DNA, 20 bp, Artificial Sequence
  Description of Artificial Sequence: Synthetic oligonucleotide
ggggggccctaaggacagtc

SEQ ID NO: 2090 - DNA, 20 bp, Artificial Sequence
  Description of Artificial Sequence: Synthetic oligonucleotide
tgtcttggggagaaaataca

SEQ ID NO: 2091 - DNA, 20 bp, Artificial Sequence
  Description of Artificial Sequence: Synthetic oligonucleotide
ggcctaagagggagagaccc

SEQ ID NO: 2092 - DNA, 20 bp, Artificial Sequence
  Description of Artificial Sequence: Synthetic oligonucleotide
cccataccttagcgtggaaa

SEQ ID NO: 2093 - DNA, 20 bp, Artificial Sequence
  Description of Artificial Sequence: Synthetic oligonucleotide
acccacccatgacagcttaa

SEQ ID NO: 2094 - DNA, 20 bp, Artificial Sequence
  Description of Artificial Sequence: Synthetic oligonucleotide
tagacctaccttaatcatgg

SEQ ID NO: 2095 - DNA, 20 bp, Artificial Sequence
  Description of Artificial Sequence: Synthetic oligonucleotide
cacaactcctggggacagtc

SEQ ID NO: 2096 - DNA, 20 bp, Artificial Sequence
  Description of Artificial Sequence: Synthetic oligonucleotide
aacttacatagagaataaag

SEQ ID NO: 2097 - DNA, 20 bp, Artificial Sequence
  Description of Artificial Sequence: Synthetic oligonucleotide
acttacatagagaataaaga

SEQ ID NO: 2098 - DNA, 20 bp, Artificial Sequence
  Description of Artificial Sequence: Synthetic oligonucleotide
gaaccagatcaggagccaac

SEQ ID NO: 2099 - DNA, 20 bp, Artificial Sequence
  Description of Artificial Sequence: Synthetic oligonucleotide
ctgtgtactgaggggcagaa

SEQ ID NO: 2100 - DNA, 20 bp, Artificial Sequence
  Description of Artificial Sequence: Synthetic oligonucleotide
gctgtgtactgaggggcaga

SEQ ID NO: 2101 - DNA, 20 bp, Artificial Sequence
  Description of Artificial Sequence: Synthetic oligonucleotide
tgtactgaggggcagaaggg

SEQ ID NO: 2102 - DNA, 20 bp, Artificial Sequence
  Description of Artificial Sequence: Synthetic oligonucleotide
ggtgctcccaggagcggagg

SEQ ID NO: 2103 - DNA, 20 bp, Artificial Sequence
  Description of Artificial Sequence: Synthetic oligonucleotide
agaggaacaaggagacattg

SEQ ID NO: 2104 - DNA, 20 bp, Artificial Sequence
  Description of Artificial Sequence: Synthetic oligonucleotide
gactcactcttctgtttcta

SEQ ID NO: 2105 - DNA, 20 bp, Artificial Sequence
  Description of Artificial Sequence: Synthetic oligonucleotide
gaaaggcagcttttggcacc

SEQ ID NO: 2106 - DNA, 20 bp, Artificial Sequence
  Description of Artificial Sequence: Synthetic oligonucleotide
agccacagaagccatgggat

SEQ ID NO: 2107 - DNA, 20 bp, Artificial Sequence
  Description of Artificial Sequence: Synthetic oligonucleotide
cccccgggagtccatcaagt

SEQ ID NO: 2108 - DNA, 20 bp, Artificial Sequence
  Description of Artificial Sequence: Synthetic oligonucleotide
taacctaggaagaaaaaaga

SEQ ID NO: 2109 - DNA, 20 bp, Artificial Sequence
  Description of Artificial Sequence: Synthetic oligonucleotide
ctcacccttggccatgtact

SEQ ID NO: 2110 - DNA, 20 bp, Artificial Sequence
  Description of Artificial Sequence: Synthetic oligonucleotide
cctgaactggaggtgaacaa

SEQ ID NO: 2111 - DNA, 20 bp, Artificial Sequence
  Description of Artificial Sequence: Synthetic oligonucleotide
tgcaatctgaaaacagaaat

SEQ ID NO: 2112 - DNA, 20 bp, Artificial Sequence
  Description of Artificial Sequence: Synthetic oligonucleotide
cacctaaggaagaagatatg

SEQ ID NO: 2113 - DNA, 20 bp, Artificial Sequence
  Description of Artificial Sequence: Synthetic oligonucleotide
agcagcagccttagagcaca

SEQ ID NO: 2114 - DNA, 20 bp, Artificial Sequence
  Description of Artificial Sequence: Synthetic oligonucleotide
cactcacccgcagggaggag

SEQ ID NO: 2115 - DNA, 20 bp, Artificial Sequence
  Description of Artificial Sequence: Synthetic oligonucleotide
aggatcctggagaggaagga

SEQ ID NO: 2116 - DNA, 20 bp, Artificial Sequence
  Description of Artificial Sequence: Synthetic oligonucleotide
ggatcctggagaggaaggag

SEQ ID NO: 2117 - DNA, 20 bp, Artificial Sequence
  Description of Artificial Sequence: Synthetic oligonucleotide
gatgaccaactctgggtagg

SEQ ID NO: 2118 - DNA, 20 bp, Artificial Sequence
  Description of Artificial Sequence: Synthetic oligonucleotide
ccttaccctcaggatttctc

SEQ ID NO: 2119 - DNA, 20 bp, Artificial Sequence
  Description of Artificial Sequence: Synthetic oligonucleotide
gtgattcaccgggatatcaa

SEQ ID NO: 2120 - DNA, 20 bp, Artificial Sequence
  Description of Artificial Sequence: Synthetic oligonucleotide
caactgtgggaggaagaaaa

SEQ ID NO: 2121 - DNA, 20 bp, Artificial Sequence
  Description of Artificial Sequence: Synthetic oligonucleotide
gcctcttactctgtaatcat

SEQ ID NO: 2122 - DNA, 20 bp, Artificial Sequence
  Description of Artificial Sequence: Synthetic oligonucleotide
tcttactctgtaatcatagg

SEQ ID NO: 2123 - DNA, 20 bp, Artificial Sequence
  Description of Artificial Sequence: Synthetic oligonucleotide
agagagctggggagaggaga

SEQ ID NO: 2124 - DNA, 20 bp, Artificial Sequence
  Description of Artificial Sequence: Synthetic oligonucleotide
ctgaacaggaaggagagcca

SEQ ID NO: 2125 - DNA, 20 bp, Artificial Sequence
  Description of Artificial Sequence: Synthetic oligonucleotide
atggaactgttggaaaaagc

SEQ ID NO: 2126 - DNA, 20 bp, Artificial Sequence
  Description of Artificial Sequence: Synthetic oligonucleotide
ttgagcagcagaaagaacag

SEQ ID NO: 2127 - DNA, 20 bp, Artificial Sequence
  Description of Artificial Sequence: Synthetic oligonucleotide
ggagagagcgggaagctaga

SEQ ID NO: 2128 - DNA, 20 bp, Artificial Sequence
  Description of Artificial Sequence: Synthetic oligonucleotide
ccttcagcagcagctgctcc

SEQ ID NO: 2129 - DNA, 20 bp, Artificial Sequence
  Description of Artificial Sequence: Synthetic oligonucleotide
ggcactccttggagagggag

SEQ ID NO: 2130 - DNA, 20 bp, Artificial Sequence
  Description of Artificial Sequence: Synthetic oligonucleotide
ctcccgccatcggcactcct

SEQ ID NO: 2131 - DNA, 20 bp, Artificial Sequence
  Description of Artificial Sequence: Synthetic oligonucleotide
gaagcccagtctaagcagac

SEQ ID NO: 2132 - DNA, 20 bp, Artificial Sequence
  Description of Artificial Sequence: Synthetic oligonucleotide
gtcgctacctgtggctccgc

SEQ ID NO: 2133 - DNA, 20 bp, Artificial Sequence
  Description of Artificial Sequence: Synthetic oligonucleotide
tagaccaagccttttgggta

SEQ ID NO: 2134 - DNA, 20 bp, Artificial Sequence
  Description of Artificial Sequence: Synthetic oligonucleotide
gggcagcagaatagccaggc

SEQ ID NO: 2135 - DNA, 20 bp, Artificial Sequence
  Description of Artificial Sequence: Synthetic oligonucleotide
aggcttctgtgggagagagt

SEQ ID NO: 2136 - DNA, 20 bp, Artificial Sequence
  Description of Artificial Sequence: Synthetic oligonucleotide
tgggtctcagagtggctccg

SEQ ID NO: 2137 - DNA, 20 bp, Artificial Sequence
  Description of Artificial Sequence: Synthetic oligonucleotide
atgatgctgttgggttcaaa

SEQ ID NO: 2138 - DNA, 20 bp, Artificial Sequence
  Description of Artificial Sequence: Synthetic oligonucleotide
tgatgctgttgggttcaaaa

SEQ ID NO: 2139 - DNA, 20 bp, Artificial Sequence
  Description of Artificial Sequence: Synthetic oligonucleotide
atccttacagcaggcttgag

SEQ ID NO: 2140 - DNA, 20 bp, Artificial Sequence
  Description of Artificial Sequence: Synthetic oligonucleotide
aatccttacagcaggcttga

SEQ ID NO: 2141 - DNA, 20 bp, Artificial Sequence
  Description of Artificial Sequence: Synthetic oligonucleotide
taggccacagagtgacaccc

SEQ ID NO: 2142 - DNA, 20 bp, Artificial Sequence
  Description of Artificial Sequence: Synthetic oligonucleotide
ccgaagacgatttcaacaaa

SEQ ID NO: 2143 - DNA, 20 bp, Artificial Sequence
  Description of Artificial Sequence: Synthetic oligonucleotide
aagcagggatggacaaccgt

SEQ ID NO: 2144 - DNA, 20 bp, Artificial Sequence
  Description of Artificial Sequence: Synthetic oligonucleotide
tccccagcccattgtctgat

SEQ ID NO: 2145 - DNA, 20 bp, Artificial Sequence
  Description of Artificial Sequence: Synthetic oligonucleotide
gagatccgatctgtggaaac

SEQ ID NO: 2146 - DNA, 20 bp, Artificial Sequence
  Description of Artificial Sequence: Synthetic oligonucleotide
cactcaccacacagagccat

SEQ ID NO: 2147 - DNA, 20 bp, Artificial Sequence
  Description of Artificial Sequence: Synthetic oligonucleotide
ttaccagaacctgtctccag

SEQ ID NO: 2148 - DNA, 20 bp, Artificial Sequence
  Description of Artificial Sequence: Synthetic oligonucleotide
agcagcactaaggagaaaaa

SEQ ID NO: 2149 - DNA, 20 bp, Artificial Sequence
  Description of Artificial Sequence: Synthetic oligonucleotide
gcagcactaaggagaaaaaa

SEQ ID NO: 2150 - DNA, 20 bp, Artificial Sequence
  Description of Artificial Sequence: Synthetic oligonucleotide
aggtcctaggaagcaaatac

SEQ ID NO: 2151 - DNA, 20 bp, Artificial Sequence
  Description of Artificial Sequence: Synthetic oligonucleotide
ggtcctaggaagcaaataca

SEQ ID NO: 2152 - DNA, 20 bp, Artificial Sequence
  Description of Artificial Sequence: Synthetic oligonucleotide
cagaatctaaagggcagaag

SEQ ID NO: 2153 - DNA, 20 bp, Artificial Sequence
  Description of Artificial Sequence: Synthetic oligonucleotide
atccagttcagcatgatctc

SEQ ID NO: 2154 - DNA, 20 bp, Artificial Sequence
  Description of Artificial Sequence: Synthetic oligonucleotide
aatacctcagttgccggtgc

SEQ ID NO: 2155 - DNA, 20 bp, Artificial Sequence
  Description of Artificial Sequence: Synthetic oligonucleotide
cccactgaccaaatatcaac

SEQ ID NO: 2156 - DNA, 20 bp, Artificial Sequence
  Description of Artificial Sequence: Synthetic oligonucleotide
tatctaatggtggaccataa

SEQ ID NO: 2157 - DNA, 20 bp, Artificial Sequence
  Description of Artificial Sequence: Synthetic oligonucleotide
atatcttagatgcctagtca

SEQ ID NO: 2158 - DNA, 20 bp, Artificial Sequence
  Description of Artificial Sequence: Synthetic oligonucleotide
cagcagattatgcgtctgac

SEQ ID NO: 2159 - DNA, 20 bp, Artificial Sequence
  Description of Artificial Sequence: Synthetic oligonucleotide
tttcttgcctgaaaaaacaa

SEQ ID NO: 2160 - DNA, 20 bp, Artificial Sequence
  Description of Artificial Sequence: Synthetic oligonucleotide
cagctatcagtaccatagac

SEQ ID NO: 2161 - DNA, 20 bp, Artificial Sequence
  Description of Artificial Sequence: Synthetic oligonucleotide
atgatcagtcctttgaaagc

SEQ ID NO: 2162 - DNA, 20 bp, Artificial Sequence
  Description of Artificial Sequence: Synthetic oligonucleotide
gtcaggcctagaaattggga

SEQ ID NO: 2163 - DNA, 20 bp, Artificial Sequence
  Description of Artificial Sequence: Synthetic oligonucleotide
aagtcacctgcagagaagga

SEQ ID NO: 2164 - DNA, 20 bp, Artificial Sequence
  Description of Artificial Sequence: Synthetic oligonucleotide
agtcacctgcagagaaggat

SEQ ID NO: 2165 - DNA, 20 bp, Artificial Sequence
  Description of Artificial Sequence: Synthetic oligonucleotide
tgggcccacctcgatgatgt

SEQ ID NO: 2166 - DNA, 20 bp, Artificial Sequence
  Description of Artificial Sequence: Synthetic oligonucleotide
ggaacagagccccctgctgg

SEQ ID NO: 2167 - DNA, 20 bp, Artificial Sequence
  Description of Artificial Sequence: Synthetic oligonucleotide
caagtaccgacgcgccagcg

SEQ ID NO: 2168 - DNA, 20 bp, Artificial Sequence
  Description of Artificial Sequence: Synthetic oligonucleotide
agcgcctggggggaaggggc

SEQ ID NO: 2169 - DNA, 20 bp, Artificial Sequence
  Description of Artificial Sequence: Synthetic oligonucleotide
aatgatgcagagttatagac

SEQ ID NO: 2170 - DNA, 20 bp, Artificial Sequence
  Description of Artificial Sequence: Synthetic oligonucleotide
cagttgactagacagaaaga

SEQ ID NO: 2171 - DNA, 20 bp, Artificial Sequence
  Description of Artificial Sequence: Synthetic oligonucleotide
ttgactagacagaaagatgg

SEQ ID NO: 2172 - DNA, 20 bp, Artificial Sequence
  Description of Artificial Sequence: Synthetic oligonucleotide
tgactagacagaaagatgga

SEQ ID NO: 2173 - DNA, 20 bp, Artificial Sequence
  Description of Artificial Sequence: Synthetic oligonucleotide
cccagcagccagcactacag

SEQ ID NO: 2174 - DNA, 20 bp, Artificial Sequence
  Description of Artificial Sequence: Synthetic oligonucleotide
tgcactcaccaacagggctg

SEQ ID NO: 2175 - DNA, 20 bp, Artificial Sequence
  Description of Artificial Sequence: Synthetic oligonucleotide
ctcaccaacagggctggggc

SEQ ID NO: 2176 - DNA, 20 bp, Artificial Sequence
  Description of Artificial Sequence: Synthetic oligonucleotide
acctgcgagtcatcacttcc

SEQ ID NO: 2177 - DNA, 20 bp, Artificial Sequence
  Description of Artificial Sequence: Synthetic oligonucleotide
ctcacctgtgttgtaggcag

SEQ ID NO: 2178 - DNA, 20 bp, Artificial Sequence
  Description of Artificial Sequence: Synthetic oligonucleotide
tcacctgtgttgtaggcagt

SEQ ID NO: 2179 - DNA, 20 bp, Artificial Sequence
  Description of Artificial Sequence: Synthetic oligonucleotide
acctcagcaacagtcccacc

SEQ ID NO: 2180 - DNA, 20 bp, Artificial Sequence
  Description of Artificial Sequence: Synthetic oligonucleotide
cccgggctggaggcaggcaa

SEQ ID NO: 2181 - DNA, 20 bp, Artificial Sequence
  Description of Artificial Sequence: Synthetic oligonucleotide
atgtctgtgaagagaggaga

SEQ ID NO: 2182 - DNA, 20 bp, Artificial Sequence
  Description of Artificial Sequence: Synthetic oligonucleotide
tttgcagcgcattggcaagt

SEQ ID NO: 2183 - DNA, 20 bp, Artificial Sequence
  Description of Artificial Sequence: Synthetic oligonucleotide
tccggcgaatggctgacgca

SEQ ID NO: 2184 - DNA, 20 bp, Artificial Sequence
  Description of Artificial Sequence: Synthetic oligonucleotide
cgaggacctggaaaacaaag

SEQ ID NO: 2185 - DNA, 20 bp, Artificial Sequence
  Description of Artificial Sequence: Synthetic oligonucleotide
cacttactggtaatgaaccc

SEQ ID NO: 2186 - DNA, 20 bp, Artificial Sequence
  Description of Artificial Sequence: Synthetic oligonucleotide
ctccgagtccttgattcatt

SEQ ID NO: 2187 - DNA, 20 bp, Artificial Sequence
  Description of Artificial Sequence: Synthetic oligonucleotide
cagattccattttccccaag

SEQ ID NO: 2188 - DNA, 20 bp, Artificial Sequence
  Description of Artificial Sequence: Synthetic oligonucleotide
tcagattccattttccccaa

SEQ ID NO: 2189 - DNA, 20 bp, Artificial Sequence
  Description of Artificial Sequence: Synthetic oligonucleotide
gaaggccatgcctggaacac

SEQ ID NO: 2190 - DNA, 20 bp, Artificial Sequence
  Description of Artificial Sequence: Synthetic oligonucleotide
ttaccttggtttctcgaaga

SEQ ID NO: 2191 - DNA, 20 bp, Artificial Sequence
  Description of Artificial Sequence: Synthetic oligonucleotide
atgcttacctctctcagagt

SEQ ID NO: 2192 - DNA, 20 bp, Artificial Sequence
  Description of Artificial Sequence: Synthetic oligonucleotide
caacaatcaggaggaagtag

SEQ ID NO: 2193 - DNA, 20 bp, Artificial Sequence
  Description of Artificial Sequence: Synthetic oligonucleotide
gtggccacatcacttgccca

SEQ ID NO: 2194 - DNA, 20 bp, Artificial Sequence
  Description of Artificial Sequence: Synthetic oligonucleotide
gcccgggcagtcctgcaagc

SEQ ID NO: 2195 - DNA, 20 bp, Artificial Sequence
  Description of Artificial Sequence: Synthetic oligonucleotide
gtacctgaagaggaagagaa

SEQ ID NO: 2196 - DNA, 20 bp, Artificial Sequence
  Description of Artificial Sequence: Synthetic oligonucleotide
ccctgccgggacttcatcaa

SEQ ID NO: 2197 - DNA, 20 bp, Artificial Sequence
  Description of Artificial Sequence: Synthetic oligonucleotide
ttaccatggcatcgtagcgc

SEQ ID NO: 2198 - DNA, 20 bp, Artificial Sequence
  Description of Artificial Sequence: Synthetic oligonucleotide
aggccacagcaccgcgccca

SEQ ID NO: 2199 - DNA, 20 bp, Artificial Sequence
  Description of Artificial Sequence: Synthetic oligonucleotide
cgctcagaaagtgaggggtg

SEQ ID NO: 2200 - DNA, 20 bp, Artificial Sequence
  Description of Artificial Sequence: Synthetic oligonucleotide
gtagtccaggcctatgcttt

SEQ ID NO: 2201 - DNA, 20 bp, Artificial Sequence
  Description of Artificial Sequence: Synthetic oligonucleotide
gatctagaagaaagaaaaga

SEQ ID NO: 2202 - DNA, 20 bp, Artificial Sequence
  Description of Artificial Sequence: Synthetic oligonucleotide
ttaccattgcatcacaaatc

SEQ ID NO: 2203 - DNA, 20 bp, Artificial Sequence
  Description of Artificial Sequence: Synthetic oligonucleotide
gtgacttaccgcccacctgc

SEQ ID NO: 2204 - DNA, 20 bp, Artificial Sequence
  Description of Artificial Sequence: Synthetic oligonucleotide
ctcccaggtaattgtgcctg

SEQ ID NO: 2205 - DNA, 20 bp, Artificial Sequence
  Description of Artificial Sequence: Synthetic oligonucleotide
aggtgaccaagatatcaacg

SEQ ID NO: 2206 - DNA, 20 bp, Artificial Sequence
  Description of Artificial Sequence: Synthetic oligonucleotide
ggtcggatcaagttttccac

SEQ ID NO: 2207 - DNA, 20 bp, Artificial Sequence
  Description of Artificial Sequence: Synthetic oligonucleotide
ttatcatcctgaaacaagag

SEQ ID NO: 2208 - DNA, 20 bp, Artificial Sequence
  Description of Artificial Sequence: Synthetic oligonucleotide
ttcagtctgaaaaagaagag

SEQ ID NO: 2209 - DNA, 20 bp, Artificial Sequence
  Description of Artificial Sequence: Synthetic oligonucleotide
aaggaacagacgggctctga

SEQ ID NO: 2210 - DNA, 20 bp, Artificial Sequence
  Description of Artificial Sequence: Synthetic oligonucleotide
gaaattaccttttgcagaag

SEQ ID NO: 2211 - DNA, 20 bp, Artificial Sequence
  Description of Artificial Sequence: Synthetic oligonucleotide
agaaattaccttttgcagaa

SEQ ID NO: 2212 - DNA, 20 bp, Artificial Sequence
  Description of Artificial Sequence: Synthetic oligonucleotide
gttgcctgagaaagaaaaag

SEQ ID NO: 2213 - DNA, 20 bp, Artificial Sequence
  Description of Artificial Sequence: Synthetic oligonucleotide
ctctcccaggcacaagacac

SEQ ID NO: 2214 - DNA, 20 bp, Artificial Sequence
  Description of Artificial Sequence: Synthetic oligonucleotide
ccgccatgccggccgcgctg

SEQ ID NO: 2215 - DNA, 20 bp, Artificial Sequence
  Description of Artificial Sequence: Synthetic oligonucleotide
gaagtgaccaagttcactcc

SEQ ID NO: 2216 - DNA, 20 bp, Artificial Sequence
  Description of Artificial Sequence: Synthetic oligonucleotide
caatccacctgaaagataaa

SEQ ID NO: 2217 - DNA, 20 bp, Artificial Sequence
  Description of Artificial Sequence: Synthetic oligonucleotide
aatccacctgaaagataaaa

SEQ ID NO: 2218 - DNA, 20 bp, Artificial Sequence
  Description of Artificial Sequence: Synthetic oligonucleotide
gttatttcagatattcagcc

SEQ ID NO: 2219 - DNA, 20 bp, Artificial Sequence
  Description of Artificial Sequence: Synthetic oligonucleotide
tgttttcacaaggttgtaat

SEQ ID NO: 2220 - DNA, 20 bp, Artificial Sequence
  Description of Artificial Sequence: Synthetic oligonucleotide
tggattcagcagtacagttt

SEQ ID NO: 2221 - DNA, 20 bp, Artificial Sequence
  Description of Artificial Sequence: Synthetic oligonucleotide
aaaacacaggtaagtgtttg

SEQ ID NO: 2222 - DNA, 20 bp, Artificial Sequence
  Description of Artificial Sequence: Synthetic oligonucleotide
aaacacaggtaagtgtttgc

SEQ ID NO: 2223 - DNA, 20 bp, Artificial Sequence
  Description of Artificial Sequence: Synthetic oligonucleotide
aacacaggtaagtgtttgcg

SEQ ID NO: 2224 - DNA, 20 bp, Artificial Sequence
  Description of Artificial Sequence: Synthetic oligonucleotide
tgaacaaatgaagactaaaa

SEQ ID NO: 2225 - DNA, 20 bp, Artificial Sequence
  Description of Artificial Sequence: Synthetic oligonucleotide
actagagcaggtaaccgggg

SEQ ID NO: 2226 - DNA, 20 bp, Artificial Sequence
  Description of Artificial Sequence: Synthetic oligonucleotide
atctccggccagtccctgag

SEQ ID NO: 2227 - DNA, 20 bp, Artificial Sequence
  Description of Artificial Sequence: Synthetic oligonucleotide
gacagatgcagatcaccctg

SEQ ID NO: 2228 - DNA, 20 bp, Artificial Sequence
  Description of Artificial Sequence: Synthetic oligonucleotide
aggaagtccagacatcggcc

SEQ ID NO: 2229 - DNA, 20 bp, Artificial Sequence
  Description of Artificial Sequence: Synthetic oligonucleotide
tggattcccaggacagcaca

SEQ ID NO: 2230 - DNA, 20 bp, Artificial Sequence
  Description of Artificial Sequence: Synthetic oligonucleotide
gcccaccttgttagtttcac

SEQ ID NO: 2231 - DNA, 20 bp, Artificial Sequence
  Description of Artificial Sequence: Synthetic oligonucleotide
aaaccttcaggagaaggaag

SEQ ID NO: 2232 - DNA, 20 bp, Artificial Sequence
  Description of Artificial Sequence: Synthetic oligonucleotide
gctgagatctaggagacaaa

SEQ ID NO: 2233 - DNA, 20 bp, Artificial Sequence
  Description of Artificial Sequence: Synthetic oligonucleotide
gatacagactctcaacagag

SEQ ID NO: 2234 - DNA, 20 bp, Artificial Sequence
  Description of Artificial Sequence: Synthetic oligonucleotide
ccattcaaggggacccacag

SEQ ID NO: 2235 - DNA, 20 bp, Artificial Sequence
  Description of Artificial Sequence: Synthetic oligonucleotide
ggggcagtcgcttacagttc

SEQ ID NO: 2236 - DNA, 20 bp, Artificial Sequence
  Description of Artificial Sequence: Synthetic oligonucleotide
acttaccctctgacttcata

SEQ ID NO: 2237 - DNA, 20 bp, Artificial Sequence
  Description of Artificial Sequence: Synthetic oligonucleotide
acagagcaaaaaatgaccag

SEQ ID NO: 2238 - DNA, 20 bp, Artificial Sequence
  Description of Artificial Sequence: Synthetic oligonucleotide
ttacctgtttctccagtagt

SEQ ID NO: 2239 - DNA, 20 bp, Artificial Sequence
  Description of Artificial Sequence: Synthetic oligonucleotide
acgcctacaattggaaaaca

SEQ ID NO: 2240 - DNA, 20 bp, Artificial Sequence
  Description of Artificial Sequence: Synthetic oligonucleotide
cgcctacaattggaaaacaa

SEQ ID NO: 2241 - DNA, 20 bp, Artificial Sequence
  Description of Artificial Sequence: Synthetic oligonucleotide
ttcctgcaggattactttga

SEQ ID NO: 2242 - DNA, 20 bp, Artificial Sequence
  Description of Artificial Sequence: Synthetic oligonucleotide
tgctgagctgttaataaaac

SEQ ID NO: 2243 - DNA, 20 bp, Artificial Sequence
  Description of Artificial Sequence: Synthetic oligonucleotide
tcacttacttcatatttctt

SEQ ID NO: 2244 - DNA, 20 bp, Artificial Sequence
  Description of Artificial Sequence: Synthetic oligonucleotide
ccagccgcagcccctaagtc

SEQ ID NO: 2245 - DNA, 20 bp, Artificial Sequence
  Description of Artificial Sequence: Synthetic oligonucleotide
tggccgggccaggatgggag

SEQ ID NO: 2246 - DNA, 20 bp, Artificial Sequence
  Description of Artificial Sequence: Synthetic oligonucleotide
acgggcagctagtgagccag

SEQ ID NO: 2247 - DNA, 20 bp, Artificial Sequence
  Description of Artificial Sequence: Synthetic oligonucleotide
cgggcagctagtgagccaga

SEQ ID NO: 2248 - DNA, 20 bp, Artificial Sequence
  Description of Artificial Sequence: Synthetic oligonucleotide
ggcctggcagggatggaggg

SEQ ID NO: 2249 - DNA, 20 bp, Artificial Sequence
  Description of Artificial Sequence: Synthetic oligonucleotide
catggcctggcagggatgga

SEQ ID NO: 2250 - DNA, 20 bp, Artificial Sequence
  Description of Artificial Sequence: Synthetic oligonucleotide
ccatggcctggcagggatgg

SEQ ID NO: 2251 - DNA, 20 bp, Artificial Sequence
  Description of Artificial Sequence: Synthetic oligonucleotide
taacgtcccagttctgattc

SEQ ID NO: 2252 - DNA, 20 bp, Artificial Sequence
  Description of Artificial Sequence: Synthetic oligonucleotide
gaatcagaactgggacgtta

SEQ ID NO: 2253 - DNA, 20 bp, Artificial Sequence
  Description of Artificial Sequence: Synthetic oligonucleotide
tgcacctgggggcaggccaa

SEQ ID NO: 2254 - DNA, 20 bp, Artificial Sequence
  Description of Artificial Sequence: Synthetic oligonucleotide
tcatacctggtggcataggc

SEQ ID NO: 2255 - DNA, 20 bp, Artificial Sequence
  Description of Artificial Sequence: Synthetic oligonucleotide
cctgctgcagatcttccctg

SEQ ID NO: 2256 - DNA, 20 bp, Artificial Sequence
  Description of Artificial Sequence: Synthetic oligonucleotide
tacctggagaccagggtggt

SEQ ID NO: 2257 - DNA, 20 bp, Artificial Sequence
  Description of Artificial Sequence: Synthetic oligonucleotide
ggcgtacctggagaccaggg

SEQ ID NO: 2258 - DNA, 20 bp, Artificial Sequence
  Description of Artificial Sequence: Synthetic oligonucleotide
cctgatgctgggggtgagag

SEQ ID NO: 2259 - DNA, 20 bp, Artificial Sequence
  Description of Artificial Sequence: Synthetic oligonucleotide
tcctgatgctgggggtgaga

SEQ ID NO: 2260 - DNA, 20 bp, Artificial Sequence
  Description of Artificial Sequence: Synthetic oligonucleotide
cggcagtactgcgagctgtg

SEQ ID NO: 2261 - DNA, 20 bp, Artificial Sequence
  Description of Artificial Sequence: Synthetic oligonucleotide
cggacagcagatcggcgacg

SEQ ID NO: 2262 - DNA, 20 bp, Artificial Sequence
  Description of Artificial Sequence: Synthetic oligonucleotide
gcttcttccagtcctgacgc

SEQ ID NO: 2263 - DNA, 20 bp, Artificial Sequence
  Description of Artificial Sequence: Synthetic oligonucleotide
tactaccttgtagcatatgc

SEQ ID NO: 2264 - DNA, 20 bp, Artificial Sequence
  Description of Artificial Sequence: Synthetic oligonucleotide
atacttcgaatttttccaga

SEQ ID NO: 2265 - DNA, 20 bp, Artificial Sequence
  Description of Artificial Sequence: Synthetic oligonucleotide
gtcaagcagctgcactgcac

SEQ ID NO: 2266 - DNA, 20 bp, Artificial Sequence
  Description of Artificial Sequence: Synthetic oligonucleotide
tcaagcagctgcactgcacc

SEQ ID NO: 2267 - DNA, 20 bp, Artificial Sequence
  Description of Artificial Sequence: Synthetic oligonucleotide
caagcagctgcactgcaccg

SEQ ID NO: 2268 - DNA, 20 bp, Artificial Sequence
  Description of Artificial Sequence: Synthetic oligonucleotide
gtagctgaaagacacaaaga

SEQ ID NO: 2269 - DNA, 20 bp, Artificial Sequence
  Description of Artificial Sequence: Synthetic oligonucleotide
tagctgaaagacacaaagaa

SEQ ID NO: 2270 - DNA, 20 bp, Artificial Sequence
  Description of Artificial Sequence: Synthetic oligonucleotide
ctattacctggttgcgtaag

SEQ ID NO: 2271 - DNA, 20 bp, Artificial Sequence
  Description of Artificial Sequence: Synthetic oligonucleotide
tattacctggttgcgtaaga

SEQ ID NO: 2272 - DNA, 20 bp, Artificial Sequence
  Description of Artificial Sequence: Synthetic oligonucleotide
atcctgcggatatttccaga

SEQ ID NO: 2273 - DNA, 20 bp, Artificial Sequence
  Description of Artificial Sequence: Synthetic oligonucleotide
tcctgcggatatttccagag

SEQ ID NO: 2274 - DNA, 20 bp, Artificial Sequence
  Description of Artificial Sequence: Synthetic oligonucleotide
tccctgggttggggacagaa

SEQ ID NO: 2275 - DNA, 20 bp, Artificial Sequence
  Description of Artificial Sequence: Synthetic oligonucleotide
atacctgcttgatggtgctg

SEQ ID NO: 2276 - DNA, 20 bp, Artificial Sequence
  Description of Artificial Sequence: Synthetic oligonucleotide
ccttggtccagaattccatg

SEQ ID NO: 2277 - DNA, 20 bp, Artificial Sequence
  Description of Artificial Sequence: Synthetic oligonucleotide
gcagctggagggacagtcac

SEQ ID NO: 2278 - DNA, 20 bp, Artificial Sequence
  Description of Artificial Sequence: Synthetic oligonucleotide
gcggtgccacagcagctgga

SEQ ID NO: 2279 - DNA, 20 bp, Artificial Sequence
  Description of Artificial Sequence: Synthetic oligonucleotide
cgcggtgccacagcagctgg

SEQ ID NO: 2280 - DNA, 20 bp, Artificial Sequence
  Description of Artificial Sequence: Synthetic oligonucleotide
ggcccccaggtttgagccga

SEQ ID NO: 2281 - DNA, 20 bp, Artificial Sequence
  Description of Artificial Sequence: Synthetic oligonucleotide
aggcccccaggtttgagccg

SEQ ID NO: 2282 - DNA, 20 bp, Artificial Sequence
  Description of Artificial Sequence: Synthetic oligonucleotide
ctctcctgtggggaggaggg

SEQ ID NO: 2283 - DNA, 20 bp, Artificial Sequence
  Description of Artificial Sequence: Synthetic oligonucleotide
aagctctcctgtggggagga

SEQ ID NO: 2284 - DNA, 20 bp, Artificial Sequence
  Description of Artificial Sequence: Synthetic oligonucleotide
ctcacctggaactggcagag

SEQ ID NO: 2285 - DNA, 20 bp, Artificial Sequence
  Description of Artificial Sequence: Synthetic oligonucleotide
tcacctggaactggcagagc

SEQ ID NO: 2286 - DNA, 20 bp, Artificial Sequence
  Description of Artificial Sequence: Synthetic oligonucleotide
gatgtactgagacggggtgc

SEQ ID NO: 2287 - DNA, 20 bp, Artificial Sequence
  Description of Artificial Sequence: Synthetic oligonucleotide
atgtactgagacggggtgca

SEQ ID NO: 2288 - DNA, 20 bp, Artificial Sequence
  Description of Artificial Sequence: Synthetic oligonucleotide
tctcaccttcttcgcaggaa

SEQ ID NO: 2289 - DNA, 20 bp, Artificial Sequence
  Description of Artificial Sequence: Synthetic oligonucleotide
ctcaccttcttcgcaggaat

SEQ ID NO: 2290 - DNA, 20 bp, Artificial Sequence
  Description of Artificial Sequence: Synthetic oligonucleotide
aggctgggggccggggaagc

SEQ ID NO: 2291 - DNA, 20 bp, Artificial Sequence
  Description of Artificial Sequence: Synthetic oligonucleotide
ccccaccttcatccgctcgt

SEQ ID NO: 2292 - DNA, 20 bp, Artificial Sequence
  Description of Artificial Sequence: Synthetic oligonucleotide
caccagctgtagaaggtgcc

SEQ ID NO: 2293 - DNA, 20 bp, Artificial Sequence
  Description of Artificial Sequence: Synthetic oligonucleotide
ccaccagctgtagaaggtgc

SEQ ID NO: 2294 - DNA, 20 bp, Artificial Sequence
  Description of Artificial Sequence: Synthetic oligonucleotide
gtgcaggccgggcttttcca

SEQ ID NO: 2295 - DNA, 20 bp, Artificial Sequence
  Description of Artificial Sequence: Synthetic oligonucleotide
gtcctgcagaaggacagggc

SEQ ID NO: 2296 - DNA, 20 bp, Artificial Sequence
  Description of Artificial Sequence: Synthetic oligonucleotide
ggcagtcctgcagaaggaca

SEQ ID NO: 2297 - DNA, 20 bp, Artificial Sequence
  Description of Artificial Sequence: Synthetic oligonucleotide
gggcagtcctgcagaaggac

SEQ ID NO: 2298 - DNA, 20 bp, Artificial Sequence
  Description of Artificial Sequence: Synthetic oligonucleotide
caaggaccagcttaagaccg

SEQ ID NO: 2299 - DNA, 20 bp, Artificial Sequence
  Description of Artificial Sequence: Synthetic oligonucleotide
acaaggaccagcttaagacc

SEQ ID NO: 2300 - DNA, 20 bp, Artificial Sequence
  Description of Artificial Sequence: Synthetic oligonucleotide
cactgaccttctccagggcg

SEQ ID NO: 2301 - DNA, 20 bp, Artificial Sequence
  Description of Artificial Sequence: Synthetic oligonucleotide
ccactgaccttctccagggc

SEQ ID NO: 2302 - DNA, 20 bp, Artificial Sequence
  Description of Artificial Sequence: Synthetic oligonucleotide
aggcgcatccacagcagctc

SEQ ID NO: 2303 - DNA, 20 bp, Artificial Sequence
  Description of Artificial Sequence: Synthetic oligonucleotide
tttgttgcagatcttggagc

SEQ ID NO: 2304 - DNA, 20 bp, Artificial Sequence
  Description of Artificial Sequence: Synthetic oligonucleotide
tgttgcagatcttggagctg

SEQ ID NO: 2305 - DNA, 20 bp, Artificial Sequence
  Description of Artificial Sequence: Synthetic oligonucleotide
ttgttgcagatcttggagct

SEQ ID NO: 2306 - DNA, 20 bp, Artificial Sequence
  Description of Artificial Sequence: Synthetic oligonucleotide
agctgctgaggggtgtgggc

SEQ ID NO: 2307 - DNA, 20 bp, Artificial Sequence
  Description of Artificial Sequence: Synthetic oligonucleotide
ctgcagctgctgaggggtgt

SEQ ID NO: 2308 - DNA, 20 bp, Artificial Sequence
  Description of Artificial Sequence: Synthetic oligonucleotide
gctgcagctgctgaggggtg

SEQ ID NO: 2309 - DNA, 20 bp, Artificial Sequence
  Description of Artificial Sequence: Synthetic oligonucleotide
tgtggcccaggtgggtgggg

SEQ ID NO: 2310 - DNA, 20 bp, Artificial Sequence
  Description of Artificial Sequence: Synthetic oligonucleotide
agagcatctggggggagccg

SEQ ID NO: 2311 - DNA, 20 bp, Artificial Sequence
  Description of Artificial Sequence: Synthetic oligonucleotide
atcgtccctgcagggaagga

SEQ ID NO: 2312 - DNA, 20 bp, Artificial Sequence
  Description of Artificial Sequence: Synthetic oligonucleotide
gctaccggaggtgccagaaa

SEQ ID NO: 2313 - DNA, 20 bp, Artificial Sequence
  Description of Artificial Sequence: Synthetic oligonucleotide
ggagctggaaggtgaaggga

SEQ ID NO: 2314 - DNA, 20 bp, Artificial Sequence
  Description of Artificial Sequence: Synthetic oligonucleotide
cggagctggaaggtgaaggg

SEQ ID NO: 2315 - DNA, 20 bp, Artificial Sequence
  Description of Artificial Sequence: Synthetic oligonucleotide
tctcggagctggaaggtgaa

SEQ ID NO: 2316 - DNA, 20 bp, Artificial Sequence
  Description of Artificial Sequence: Synthetic oligonucleotide
gatgaagcaggtgaggccca

SEQ ID NO: 2317 - DNA, 20 bp, Artificial Sequence
  Description of Artificial Sequence: Synthetic oligonucleotide
cccctggtgggcagatggga

SEQ ID NO: 2318 - DNA, 20 bp, Artificial Sequence
  Description of Artificial Sequence: Synthetic oligonucleotide
ccccctggtgggcagatggg

SEQ ID NO: 2319 - DNA, 20 bp, Artificial Sequence
  Description of Artificial Sequence: Synthetic oligonucleotide
cttccccctggtgggcagat

SEQ ID NO: 2320 - DNA, 20 bp, Artificial Sequence
  Description of Artificial Sequence: Synthetic oligonucleotide
gcttccccctggtgggcaga

SEQ ID NO: 2321 - DNA, 20 bp, Artificial Sequence
  Description of Artificial Sequence: Synthetic oligonucleotide
ctcaccagacttcagccagc

SEQ ID NO: 2322 - DNA, 20 bp, Artificial Sequence
  Description of Artificial Sequence: Synthetic oligonucleotide
tcaccagacttcagccagca

SEQ ID NO: 2323 - DNA, 20 bp, Artificial Sequence
  Description of Artificial Sequence: Synthetic oligonucleotide
acgctgccaggccagagagc

SEQ ID NO: 2324 - DNA, 20 bp, Artificial Sequence
  Description of Artificial Sequence: Synthetic oligonucleotide
cacgctgccaggccagagag

SEQ ID NO: 2325 - DNA, 20 bp, Artificial Sequence
  Description of Artificial Sequence: Synthetic oligonucleotide
gatccacaggggcttcatct

SEQ ID NO: 2326 - DNA, 20 bp, Artificial Sequence
  Description of Artificial Sequence: Synthetic oligonucleotide
ggtctgtgccaccggccggt

SEQ ID NO: 2327 - DNA, 20 bp, Artificial Sequence
  Description of Artificial Sequence: Synthetic oligonucleotide
aggtctgtgccaccggccgg

SEQ ID NO: 2328 - DNA, 20 bp, Artificial Sequence
  Description of Artificial Sequence: Synthetic oligonucleotide
cggaggtctgtgccaccggc

SEQ ID NO: 2329 - DNA, 20 bp, Artificial Sequence
  Description of Artificial Sequence: Synthetic oligonucleotide
cctgcagatgatccagctca

SEQ ID NO: 2330 - DNA, 20 bp, Artificial Sequence
  Description of Artificial Sequence: Synthetic oligonucleotide
atcctaggcaagggggaaga

SEQ ID NO: 2331 - DNA, 20 bp, Artificial Sequence
  Description of Artificial Sequence: Synthetic oligonucleotide
catcctaggcaagggggaag

SEQ ID NO: 2332 - DNA, 20 bp, Artificial Sequence
  Description of Artificial Sequence: Synthetic oligonucleotide
cctgtacctgcccactctct

SEQ ID NO: 2333 - DNA, 20 bp, Artificial Sequence
  Description of Artificial Sequence: Synthetic oligonucleotide
gagtgggcaggtacaggggc

SEQ ID NO: 2334 - DNA, 20 bp, Artificial Sequence
  Description of Artificial Sequence: Synthetic oligonucleotide
aacagctgaggggaggggag

SEQ ID NO: 2335 - DNA, 20 bp, Artificial Sequence
  Description of Artificial Sequence: Synthetic oligonucleotide
aacctgcaggtaggggacag

SEQ ID NO: 2336 - DNA, 20 bp, Artificial Sequence
  Description of Artificial Sequence: Synthetic oligonucleotide
gtcctgcaaacaaatcacag

SEQ ID NO: 2337 - DNA, 20 bp, Artificial Sequence
  Description of Artificial Sequence: Synthetic oligonucleotide
ggttttccagctctcacgga

SEQ ID NO: 2338 - DNA, 20 bp, Artificial Sequence
  Description of Artificial Sequence: Synthetic oligonucleotide
tggttttccagctctcacgg

SEQ ID NO: 2339 - DNA, 20 bp, Artificial Sequence
  Description of Artificial Sequence: Synthetic oligonucleotide
ggagaacagcagcctttgag

SEQ ID NO: 2340 - DNA, 20 bp, Artificial Sequence
  Description of Artificial Sequence: Synthetic oligonucleotide
ctggtccaacttccactcaa

SEQ ID NO: 2341 - DNA, 20 bp, Artificial Sequence
  Description of Artificial Sequence: Synthetic oligonucleotide
ctggcatccagtattgtttc

SEQ ID NO: 2342 - DNA, 20 bp, Artificial Sequence
  Description of Artificial Sequence: Synthetic oligonucleotide
aatcaaactataaagaaaat

SEQ ID NO: 2343 - DNA, 20 bp, Artificial Sequence
  Description of Artificial Sequence: Synthetic oligonucleotide
tcagtttacctatttcgagc

SEQ ID NO: 2344 - DNA, 20 bp, Artificial Sequence
  Description of Artificial Sequence: Synthetic oligonucleotide
gtgtgcagttaaaagacctg

SEQ ID NO: 2345 - DNA, 20 bp, Artificial Sequence
  Description of Artificial Sequence: Synthetic oligonucleotide
agggcacaagctatagcaat

SEQ ID NO: 2346 - DNA, 20 bp, Artificial Sequence
  Description of Artificial Sequence: Synthetic oligonucleotide
tactctgaaaggatgaagac

SEQ ID NO: 2347 - DNA, 20 bp, Artificial Sequence
  Description of Artificial Sequence: Synthetic oligonucleotide
acagaacagatagctgaaga

SEQ ID NO: 2348 - DNA, 20 bp, Artificial Sequence
  Description of Artificial Sequence: Synthetic oligonucleotide
aatcttttagtgttgggaag

SEQ ID NO: 2349 - DNA, 20 bp, Artificial Sequence
  Description of Artificial Sequence: Synthetic oligonucleotide
gaatcttttagtgttgggaa

SEQ ID NO: 2350 - DNA, 20 bp, Artificial Sequence
  Description of Artificial Sequence: Synthetic oligonucleotide
agaatcttttagtgttggga

SEQ ID NO: 2351 - DNA, 20 bp, Artificial Sequence
  Description of Artificial Sequence: Synthetic oligonucleotide
ctcctacctttttggtcagc

SEQ ID NO: 2352 - DNA, 20 bp, Artificial Sequence
  Description of Artificial Sequence: Synthetic oligonucleotide
tcctacctttttggtcagca

SEQ ID NO: 2353 - DNA, 20 bp, Artificial Sequence
  Description of Artificial Sequence: Synthetic oligonucleotide
gccttacagcaacctctcca

SEQ ID NO: 2354 - DNA, 20 bp, Artificial Sequence
  Description of Artificial Sequence: Synthetic oligonucleotide
attcttacctgaagcacaat

SEQ ID NO: 2355 - DNA, 20 bp, Artificial Sequence
  Description of Artificial Sequence: Synthetic oligonucleotide
aagcgtgtctggggaaaaag

SEQ ID NO: 2356 - DNA, 20 bp, Artificial Sequence
  Description of Artificial Sequence: Synthetic oligonucleotide
gaatcgctagggtttggagg

SEQ ID NO: 2357 - DNA, 20 bp, Artificial Sequence
  Description of Artificial Sequence: Synthetic oligonucleotide
cgaatcgctagggtttggag

SEQ ID NO: 2358 - DNA, 20 bp, Artificial Sequence
  Description of Artificial Sequence: Synthetic oligonucleotide
acgaatcgctagggtttgga

SEQ ID NO: 2359 - DNA, 20 bp, Artificial Sequence
  Description of Artificial Sequence: Synthetic oligonucleotide
aacacctactggattgttac

SEQ ID NO: 2360 - DNA, 20 bp, Artificial Sequence
  Description of Artificial Sequence: Synthetic oligonucleotide
tggcatccagaacaaggagg

SEQ ID NO: 2361 - DNA, 20 bp, Artificial Sequence
  Description of Artificial Sequence: Synthetic oligonucleotide
catccagaacaaggaggcgg

SEQ ID NO: 2362 - DNA, 20 bp, Artificial Sequence
  Description of Artificial Sequence: Synthetic oligonucleotide
cgctactgcaggagatctac

SEQ ID NO: 2363 - DNA, 20 bp, Artificial Sequence
  Description of Artificial Sequence: Synthetic oligonucleotide
ggtgcagatcatcaagaaga

SEQ ID NO: 2364 - DNA, 20 bp, Artificial Sequence
  Description of Artificial Sequence: Synthetic oligonucleotide
ccacctgcagagcaaccacc

SEQ ID NO: 2365 - DNA, 20 bp, Artificial Sequence
  Description of Artificial Sequence: Synthetic oligonucleotide
tcacctgtgtagctgctgga

SEQ ID NO: 2366 - DNA, 20 bp, Artificial Sequence
  Description of Artificial Sequence: Synthetic oligonucleotide
ctcctcacctgtgtagctgc

SEQ ID NO: 2367 - DNA, 20 bp, Artificial Sequence
  Description of Artificial Sequence: Synthetic oligonucleotide
gccacaggaggaagcccctg

SEQ ID NO: 2368 - DNA, 20 bp, Artificial Sequence
  Description of Artificial Sequence: Synthetic oligonucleotide
agaggtctgcggacacacga

SEQ ID NO: 2369 - DNA, 20 bp, Artificial Sequence
  Description of Artificial Sequence: Synthetic oligonucleotide
caactgcagatgggctgtga

SEQ ID NO: 2370 - DNA, 20 bp, Artificial Sequence
  Description of Artificial Sequence: Synthetic oligonucleotide
aactgcagatgggctgtgac

SEQ ID NO: 2371 - DNA, 20 bp, Artificial Sequence
  Description of Artificial Sequence: Synthetic oligonucleotide
agccctgaagcaccaagaac

SEQ ID NO: 2372 - DNA, 20 bp, Artificial Sequence
  Description of Artificial Sequence: Synthetic oligonucleotide
cttccagaagtgcctggcac

SEQ ID NO: 2373 - DNA, 20 bp, Artificial Sequence
  Description of Artificial Sequence: Synthetic oligonucleotide
ggatagctgcacagggaagg

SEQ ID NO: 2374 - DNA, 20 bp, Artificial Sequence
  Description of Artificial Sequence: Synthetic oligonucleotide
cggatagctgcacagggaag

SEQ ID NO: 2375 - DNA, 20 bp, Artificial Sequence
  Description of Artificial Sequence: Synthetic oligonucleotide
acggatagctgcacagggaa

SEQ ID NO: 2376 - DNA, 20 bp, Artificial Sequence
  Description of Artificial Sequence: Synthetic oligonucleotide
aacactcaccgccgtgtggc

SEQ ID NO: 2377 - DNA, 20 bp, Artificial Sequence
  Description of Artificial Sequence: Synthetic oligonucleotide
ctcacctccacacagaatga

SEQ ID NO: 2378 - DNA, 20 bp, Artificial Sequence
  Description of Artificial Sequence: Synthetic oligonucleotide
gtggcaggcagagaaggggc

SEQ ID NO: 2379 - DNA, 20 bp, Artificial Sequence
  Description of Artificial Sequence: Synthetic oligonucleotide
ggccggtctgtggggacaca

SEQ ID NO: 2380 - DNA, 20 bp, Artificial Sequence
  Description of Artificial Sequence: Synthetic oligonucleotide
tggccggtctgtggggacac

SEQ ID NO: 2381 - DNA, 20 bp, Artificial Sequence
  Description of Artificial Sequence: Synthetic oligonucleotide
cagcttggggaagaggtact

SEQ ID NO: 2382 - DNA, 20 bp, Artificial Sequence
  Description of Artificial Sequence: Synthetic oligonucleotide
gcagcttggggaagaggtac

SEQ ID NO: 2383 - DNA, 20 bp, Artificial Sequence
  Description of Artificial Sequence: Synthetic oligonucleotide
tctgctccaggagatctaca

SEQ ID NO: 2384 - DNA, 20 bp, Artificial Sequence
  Description of Artificial Sequence: Synthetic oligonucleotide
ggtcatggccgccagaccct

SEQ ID NO: 2385 - DNA, 20 bp, Artificial Sequence
  Description of Artificial Sequence: Synthetic oligonucleotide
gtccagtgtcccagaatgcc

SEQ ID NO: 2386 - DNA, 20 bp, Artificial Sequence
  Description of Artificial Sequence: Synthetic oligonucleotide
aatcacctctgaacaatccc

SEQ ID NO: 2387 - DNA, 20 bp, Artificial Sequence
  Description of Artificial Sequence: Synthetic oligonucleotide
cagcctggaagagaaaggaa

SEQ ID NO: 2388 - DNA, 20 bp, Artificial Sequence
  Description of Artificial Sequence: Synthetic oligonucleotide
gcttacctcttcactgttgg

SEQ ID NO: 2389 - DNA, 20 bp, Artificial Sequence
  Description of Artificial Sequence: Synthetic oligonucleotide
gaggcttacctcttcactgt

SEQ ID NO: 2390 - DNA, 20 bp, Artificial Sequence
  Description of Artificial Sequence: Synthetic oligonucleotide
ttgtgctgaaataaagaaaa

SEQ ID NO: 2391 - DNA, 20 bp, Artificial Sequence
  Description of Artificial Sequence: Synthetic oligonucleotide
tgtgctgaaataaagaaaaa

SEQ ID NO: 2392 - DNA, 20 bp, Artificial Sequence
  Description of Artificial Sequence: Synthetic oligonucleotide
gtgctgaaataaagaaaaag

SEQ ID NO: 2393 - DNA, 20 bp, Artificial Sequence
  Description of Artificial Sequence: Synthetic oligonucleotide
ctaccttcagattggagagc

SEQ ID NO: 2394 - DNA, 20 bp, Artificial Sequence
  Description of Artificial Sequence: Synthetic oligonucleotide
ctgcgcacctggcattcatg

SEQ ID NO: 2395 - DNA, 20 bp, Artificial Sequence
  Description of Artificial Sequence: Synthetic oligonucleotide
ttgcaaagaaacatggggaa

SEQ ID NO: 2396 - DNA, 20 bp, Artificial Sequence
  Description of Artificial Sequence: Synthetic oligonucleotide
tgaccgacattccatggcca

SEQ ID NO: 2397 - DNA, 20 bp, Artificial Sequence
  Description of Artificial Sequence: Synthetic oligonucleotide
tttcactgaaagggagagag

SEQ ID NO: 2398 - DNA, 20 bp, Artificial Sequence
  Description of Artificial Sequence: Synthetic oligonucleotide
ctttcactgaaagggagaga

SEQ ID NO: 2399 - DNA, 20 bp, Artificial Sequence
  Description of Artificial Sequence: Synthetic oligonucleotide
tctttcactgaaagggagag

SEQ ID NO: 2400 - DNA, 20 bp, Artificial Sequence
  Description of Artificial Sequence: Synthetic oligonucleotide
tgttctgtgggcagaggggt

SEQ ID NO: 2401 - DNA, 20 bp, Artificial Sequence
  Description of Artificial Sequence: Synthetic oligonucleotide
gctgtgttctgtgggcagag

SEQ ID NO: 2402 - DNA, 20 bp, Artificial Sequence
  Description of Artificial Sequence: Synthetic oligonucleotide
acctcaccttctgtttgtcg

SEQ ID NO: 2403 - DNA, 20 bp, Artificial Sequence
  Description of Artificial Sequence: Synthetic oligonucleotide
ccacctgggaagggaaggag

SEQ ID NO: 2404 - DNA, 20 bp, Artificial Sequence
  Description of Artificial Sequence: Synthetic oligonucleotide
accacctgggaagggaagga

SEQ ID NO: 2405 - DNA, 20 bp, Artificial Sequence
  Description of Artificial Sequence: Synthetic oligonucleotide
caccacctgggaagggaagg

SEQ ID NO: 2406 - DNA, 20 bp, Artificial Sequence
  Description of Artificial Sequence: Synthetic oligonucleotide
gtcctgtgggaagcagtggc

SEQ ID NO: 2407 - DNA, 20 bp, Artificial Sequence
  Description of Artificial Sequence: Synthetic oligonucleotide
agttgtcctgtgggaagcag

SEQ ID NO: 2408 - DNA, 20 bp, Artificial Sequence
  Description of Artificial Sequence: Synthetic oligonucleotide
ctcactgatggggacaaatg

SEQ ID NO: 2409 - DNA, 20 bp, Artificial Sequence
  Description of Artificial Sequence: Synthetic oligonucleotide
gctcactgatggggacaaat

SEQ ID NO: 2410 - DNA, 20 bp, Artificial Sequence
  Description of Artificial Sequence: Synthetic oligonucleotide
ggctcactgatggggacaaa

SEQ ID NO: 2411 - DNA, 20 bp, Artificial Sequence
  Description of Artificial Sequence: Synthetic oligonucleotide
gcacctgaatgtagccctgc

SEQ ID NO: 2412 - DNA, 20 bp, Artificial Sequence
  Description of Artificial Sequence: Synthetic oligonucleotide
tcacctgtgggcacaagaac

SEQ ID NO: 2413 - DNA, 20 bp, Artificial Sequence
  Description of Artificial Sequence: Synthetic oligonucleotide
agccctggagcaagatgggg

SEQ ID NO: 2414 - DNA, 20 bp, Artificial Sequence
  Description of Artificial Sequence: Synthetic oligonucleotide
tagccctggagcaagatggg

SEQ ID NO: 2415 - DNA, 20 bp, Artificial Sequence
  Description of Artificial Sequence: Synthetic oligonucleotide
gtagccctggagcaagatgg

SEQ ID NO: 2416 - DNA, 20 bp, Artificial Sequence
  Description of Artificial Sequence: Synthetic oligonucleotide
tgtagccctggagcaagatg

SEQ ID NO: 2417 - DNA, 20 bp, Artificial Sequence
  Description of Artificial Sequence: Synthetic oligonucleotide
ttgtagccctggagcaagat

SEQ ID NO: 2418 - DNA, 20 bp, Artificial Sequence
  Description of Artificial Sequence: Synthetic oligonucleotide
cacctggaggaaggggtaca

SEQ ID NO: 2419 - DNA, 20 bp, Artificial Sequence
  Description of Artificial Sequence: Synthetic oligonucleotide
gcccaccttcctctggtaga

SEQ ID NO: 2420 - DNA, 20 bp, Artificial Sequence
  Description of Artificial Sequence: Synthetic oligonucleotide
ggagcgggggggagaagcgg

SEQ ID NO: 2421 - DNA, 20 bp, Artificial Sequence
  Description of Artificial Sequence: Synthetic oligonucleotide
aaacaaaaggagatatcaag

SEQ ID NO: 2422 - DNA, 20 bp, Artificial Sequence
  Description of Artificial Sequence: Synthetic oligonucleotide
atatctgagtactttagtta

SEQ ID NO: 2423 - DNA, 20 bp, Artificial Sequence
  Description of Artificial Sequence: Synthetic oligonucleotide
cctacctctgcaattaaatt

SEQ ID NO: 2424 - DNA, 20 bp, Artificial Sequence
  Description of Artificial Sequence: Synthetic oligonucleotide
ataacttacctttttgtctc

SEQ ID NO: 2425 - DNA, 20 bp, Artificial Sequence
  Description of Artificial Sequence: Synthetic oligonucleotide
tcgctggcagccgctgtact

SEQ ID NO: 2426 - DNA, 20 bp, Artificial Sequence
  Description of Artificial Sequence: Synthetic oligonucleotide
actctaaaaagtgaaaatca

SEQ ID NO: 2427 - DNA, 20 bp, Artificial Sequence
  Description of Artificial Sequence: Synthetic oligonucleotide
aggtgcagcagatgaaacag

SEQ ID NO: 2428 - DNA, 20 bp, Artificial Sequence
  Description of Artificial Sequence: Synthetic oligonucleotide
accacctgggcggcccaggc

SEQ ID NO: 2429 - DNA, 20 bp, Artificial Sequence
  Description of Artificial Sequence: Synthetic oligonucleotide
ccacctgggcggcccaggca

SEQ ID NO: 2430 - DNA, 20 bp, Artificial Sequence
  Description of Artificial Sequence: Synthetic oligonucleotide
cccccaccctgcagggcacc

SEQ ID NO: 2431 - DNA, 20 bp, Artificial Sequence
  Description of Artificial Sequence: Synthetic oligonucleotide
ccaccctgcagggcaccagg

SEQ ID NO: 2432 - DNA, 20 bp, Artificial Sequence
  Description of Artificial Sequence: Synthetic oligonucleotide
agccctcacctctcactagt

SEQ ID NO: 2433 - DNA, 20 bp, Artificial Sequence
  Description of Artificial Sequence: Synthetic oligonucleotide
cacctagagaaggcagcgtc

SEQ ID NO: 2434 - DNA, 20 bp, Artificial Sequence
  Description of Artificial Sequence: Synthetic oligonucleotide
accctggggggagccaaatt

SEQ ID NO: 2435 - DNA, 20 bp, Artificial Sequence
  Description of Artificial Sequence: Synthetic oligonucleotide
caaactctgagatgtgggtg

SEQ ID NO: 2436 - DNA, 20 bp, Artificial Sequence
  Description of Artificial Sequence: Synthetic oligonucleotide
gcaaactctgagatgtgggt

SEQ ID NO: 2437 - DNA, 20 bp, Artificial Sequence
  Description of Artificial Sequence: Synthetic oligonucleotide
tcaactgggagtgggcggag

SEQ ID NO: 2438 - DNA, 20 bp, Artificial Sequence
  Description of Artificial Sequence: Synthetic oligonucleotide
actgctgaccttgatgtagt

SEQ ID NO: 2439 - DNA, 20 bp, Artificial Sequence
  Description of Artificial Sequence: Synthetic oligonucleotide
gctggttctggacgcaagcg

SEQ ID NO: 2440 - DNA, 20 bp, Artificial Sequence
  Description of Artificial Sequence: Synthetic oligonucleotide
ttgttctggaaagggagggt

SEQ ID NO: 2441 - DNA, 20 bp, Artificial Sequence
  Description of Artificial Sequence: Synthetic oligonucleotide
tgttctggaaagggagggtc

SEQ ID NO: 2442 - DNA, 20 bp, Artificial Sequence
  Description of Artificial Sequence: Synthetic oligonucleotide
gccactcacattgtccagcg

SEQ ID NO: 2443 - DNA, 20 bp, Artificial Sequence
  Description of Artificial Sequence: Synthetic oligonucleotide
ctccctaagccgaggacata

SEQ ID NO: 2444 - DNA, 20 bp, Artificial Sequence
  Description of Artificial Sequence: Synthetic oligonucleotide
tctccctaagccgaggacat

SEQ ID NO: 2445 - DNA, 20 bp, Artificial Sequence
  Description of Artificial Sequence: Synthetic oligonucleotide
tcacctgcagtgcacgatga

SEQ ID NO: 2446 - DNA, 20 bp, Artificial Sequence
  Description of Artificial Sequence: Synthetic oligonucleotide
ccggcgctggggaaagacgg

SEQ ID NO: 2447 - DNA, 20 bp, Artificial Sequence
  Description of Artificial Sequence: Synthetic oligonucleotide
gccggcgctggggaaagacg

SEQ ID NO: 2448 - DNA, 20 bp, Artificial Sequence
  Description of Artificial Sequence: Synthetic oligonucleotide
tgccggcgctggggaaagac

SEQ ID NO: 2449 - DNA, 20 bp, Artificial Sequence
  Description of Artificial Sequence: Synthetic oligonucleotide
cactcacttggacgaggtgc

SEQ ID NO: 2450 - DNA, 20 bp, Artificial Sequence
  Description of Artificial Sequence: Synthetic oligonucleotide
ccactcacttggacgaggtg

SEQ ID NO: 2451 - DNA, 20 bp, Artificial Sequence
  Description of Artificial Sequence: Synthetic oligonucleotide
tgtctgcagccgggtgcagg

SEQ ID NO: 2452 - DNA, 20 bp, Artificial Sequence
  Description of Artificial Sequence: Synthetic oligonucleotide
gtgtctgcagccgggtgcag

SEQ ID NO: 2453 - DNA, 20 bp, Artificial Sequence
  Description of Artificial Sequence: Synthetic oligonucleotide
tgtgtctgcagccgggtgca

SEQ ID NO: 2454 - DNA, 20 bp, Artificial Sequence
  Description of Artificial Sequence: Synthetic oligonucleotide
caccgctcacttcctcttga

SEQ ID NO: 2455 - DNA, 20 bp, Artificial Sequence
  Description of Artificial Sequence: Synthetic oligonucleotide
gcaccgctcacttcctcttg

SEQ ID NO: 2456 - DNA, 20 bp, Artificial Sequence
  Description of Artificial Sequence: Synthetic oligonucleotide
tttcttctaaaatagtccat

SEQ ID NO: 2457 - DNA, 20 bp, Artificial Sequence
  Description of Artificial Sequence: Synthetic oligonucleotide
gttactgacctttcagaggt

SEQ ID NO: 2458 - DNA, 20 bp, Artificial Sequence
  Description of Artificial Sequence: Synthetic oligonucleotide
actacttactctgcacaggg

SEQ ID NO: 2459 - DNA, 20 bp, Artificial Sequence
  Description of Artificial Sequence: Synthetic oligonucleotide
gacctaaaatataaaaaatt

SEQ ID NO: 2460 - DNA, 20 bp, Artificial Sequence
  Description of Artificial Sequence: Synthetic oligonucleotide
atttacctgaacctctgaat

SEQ ID NO: 2461 - DNA, 20 bp, Artificial Sequence
  Description of Artificial Sequence: Synthetic oligonucleotide
cttactgtacaacaagctgc

SEQ ID NO: 2462 - DNA, 20 bp, Artificial Sequence
  Description of Artificial Sequence: Synthetic oligonucleotide
cgatcctgaaaattgaaaac

SEQ ID NO: 2463 - DNA, 20 bp, Artificial Sequence
  Description of Artificial Sequence: Synthetic oligonucleotide
cccttaccaggcttgatgag

SEQ ID NO: 2464 - DNA, 20 bp, Artificial Sequence
  Description of Artificial Sequence: Synthetic oligonucleotide
gatattggctaaatacagaa

SEQ ID NO: 2465 - DNA, 20 bp, Artificial Sequence
  Description of Artificial Sequence: Synthetic oligonucleotide
ttctgtacctcatcaagaat

SEQ ID NO: 2466 - DNA, 20 bp, Artificial Sequence
  Description of Artificial Sequence: Synthetic oligonucleotide
ttctcctgcaggatttaaaa

SEQ ID NO: 2467 - DNA, 20 bp, Artificial Sequence
  Description of Artificial Sequence: Synthetic oligonucleotide
ggtcatctgcaggaaaaaaa

SEQ ID NO: 2468 - DNA, 20 bp, Artificial Sequence
  Description of Artificial Sequence: Synthetic oligonucleotide
caagaactaaatggggaaat

SEQ ID NO: 2469 - DNA, 20 bp, Artificial Sequence
  Description of Artificial Sequence: Synthetic oligonucleotide
ggcgagcctgagggcggggc

SEQ ID NO: 2470 - DNA, 20 bp, Artificial Sequence
  Description of Artificial Sequence: Synthetic oligonucleotide
tggcgagcctgagggcgggg

SEQ ID NO: 2471 - DNA, 20 bp, Artificial Sequence
  Description of Artificial Sequence: Synthetic oligonucleotide
cctcgcctgtcacgtgcagc

SEQ ID NO: 2472 - DNA, 20 bp, Artificial Sequence
  Description of Artificial Sequence: Synthetic oligonucleotide
gcgcgccagatggccgtcag

SEQ ID NO: 2473 - DNA, 20 bp, Artificial Sequence
  Description of Artificial Sequence: Synthetic oligonucleotide
tgcatggaccagcgctgcgc

SEQ ID NO: 2474 - DNA, 20 bp, Artificial Sequence
  Description of Artificial Sequence: Synthetic oligonucleotide
gtccatgcaggtgccacccg

SEQ ID NO: 2475 - DNA, 20 bp, Artificial Sequence
  Description of Artificial Sequence: Synthetic oligonucleotide
agcgcagcgctggtccatgc

SEQ ID NO: 2476 - DNA, 20 bp, Artificial Sequence
  Description of Artificial Sequence: Synthetic oligonucleotide
cgcacccacctgggcggcgg

SEQ ID NO: 2477 - DNA, 20 bp, Artificial Sequence
  Description of Artificial Sequence: Synthetic oligonucleotide
cgcggctgcaggggagaagg

SEQ ID NO: 2478 - DNA, 20 bp, Artificial Sequence
  Description of Artificial Sequence: Synthetic oligonucleotide
gcacccacctgggcggcggc

SEQ ID NO: 2479 - DNA, 20 bp, Artificial Sequence
  Description of Artificial Sequence: Synthetic oligonucleotide
cggcgcggctgcaggggaga

SEQ ID NO: 2480 - DNA, 20 bp, Artificial Sequence
  Description of Artificial Sequence: Synthetic oligonucleotide
gcggctgcaggggagaaggc

SEQ ID NO: 2481 - DNA, 20 bp, Artificial Sequence
  Description of Artificial Sequence: Synthetic oligonucleotide
gggccggaccaggcgagggc

SEQ ID NO: 2482 - DNA, 20 bp, Artificial Sequence
  Description of Artificial Sequence: Synthetic oligonucleotide
ccggaccaggcgagggcggg

SEQ ID NO: 2483 - DNA, 20 bp, Artificial Sequence
  Description of Artificial Sequence: Synthetic oligonucleotide
atttgagccagatgaacccc

SEQ ID NO: 2484 - DNA, 20 bp, Artificial Sequence
  Description of Artificial Sequence: Synthetic oligonucleotide
ttaccctccgggttgggcag

SEQ ID NO: 2485 - DNA, 20 bp, Artificial Sequence
  Description of Artificial Sequence: Synthetic oligonucleotide
cttaccctccgggttgggca

SEQ ID NO: 2486 - DNA, 20 bp, Artificial Sequence
  Description of Artificial Sequence: Synthetic oligonucleotide
gtcctggggaaacaaaggca

SEQ ID NO: 2487 - DNA, 20 bp, Artificial Sequence
  Description of Artificial Sequence: Synthetic oligonucleotide
atccagtcctggggaaacaa

SEQ ID NO: 2488 - DNA, 20 bp, Artificial Sequence
  Description of Artificial Sequence: Synthetic oligonucleotide
tactcacccatggtaaactc

SEQ ID NO: 2489 - DNA, 20 bp, Artificial Sequence
  Description of Artificial Sequence: Synthetic oligonucleotide
taaaaccctgcaggaggtgg

SEQ ID NO: 2490 - DNA, 20 bp, Artificial Sequence
  Description of Artificial Sequence: Synthetic oligonucleotide
agtctgtgggccagaagaaa

SEQ ID NO: 2491 - DNA, 20 bp, Artificial Sequence
  Description of Artificial Sequence: Synthetic oligonucleotide
actcacctgtgagctgccaa

SEQ ID NO: 2492 - DNA, 20 bp, Artificial Sequence
  Description of Artificial Sequence: Synthetic oligonucleotide
gctgccaaaggatatagatg

SEQ ID NO: 2493 - DNA, 20 bp, Artificial Sequence
  Description of Artificial Sequence: Synthetic oligonucleotide
ctgccaaaggatatagatga

SEQ ID NO: 2494 - DNA, 20 bp, Artificial Sequence
  Description of Artificial Sequence: Synthetic oligonucleotide
gtcaccttcacagagcttcc

SEQ ID NO: 2495 - DNA, 20 bp, Artificial Sequence
  Description of Artificial Sequence: Synthetic oligonucleotide
cagcaccttcagagaatggg

SEQ ID NO: 2496 - DNA, 20 bp, Artificial Sequence
  Description of Artificial Sequence: Synthetic oligonucleotide
caccttcagagaatgggtgg

SEQ ID NO: 2497 - DNA, 20 bp, Artificial Sequence
  Description of Artificial Sequence: Synthetic oligonucleotide
atgtactctaaaagcaagtt

SEQ ID NO: 2498 - DNA, 20 bp, Artificial Sequence
  Description of Artificial Sequence: Synthetic oligonucleotide
aatgtactctaaaagcaagt

SEQ ID NO: 2499 - DNA, 20 bp, Artificial Sequence
  Description of Artificial Sequence: Synthetic oligonucleotide
cgctgcgccagcgccgcgtg

SEQ ID NO: 2500 - DNA, 20 bp, Artificial Sequence
  Description of Artificial Sequence: Synthetic oligonucleotide
gggcccccagtagaatccgc

SEQ ID NO: 2501 - DNA, 20 bp, Artificial Sequence
  Description of Artificial Sequence: Synthetic oligonucleotide
cttacctacctcccaatgtc

SEQ ID NO: 2502 - DNA, 20 bp, Artificial Sequence
  Description of Artificial Sequence: Synthetic oligonucleotide
ctgcatctacagtaatctga

SEQ ID NO: 2503 - DNA, 20 bp, Artificial Sequence
  Description of Artificial Sequence: Synthetic oligonucleotide
atggtatcctaaaatagaaa

SEQ ID NO: 2504 - DNA, 20 bp, Artificial Sequence
  Description of Artificial Sequence: Synthetic oligonucleotide
tcatacctgcaggagctgag

SEQ ID NO: 2505 - DNA, 20 bp, Artificial Sequence
  Description of Artificial Sequence: Synthetic oligonucleotide
taagctagaagagaagtgga

SEQ ID NO: 2506 - DNA, 20 bp, Artificial Sequence
  Description of Artificial Sequence: Synthetic oligonucleotide
ctcttaagctagaagagaag

SEQ ID NO: 2507 - DNA, 20 bp, Artificial Sequence
  Description of Artificial Sequence: Synthetic oligonucleotide
gctgcagcctggatcaagcg

SEQ ID NO: 2508 - DNA, 20 bp, Artificial Sequence
  Description of Artificial Sequence: Synthetic oligonucleotide
gctgcaggacctgtgccgcc

SEQ ID NO: 2509 - DNA, 20 bp, Artificial Sequence
  Description of Artificial Sequence: Synthetic oligonucleotide
ttcctgttgggggtgggtag

SEQ ID NO: 2510 - DNA, 20 bp, Artificial Sequence
  Description of Artificial Sequence: Synthetic oligonucleotide
gttcctgttgggggtgggta

SEQ ID NO: 2511 - DNA, 20 bp, Artificial Sequence
  Description of Artificial Sequence: Synthetic oligonucleotide
tgttcctgttgggggtgggt

SEQ ID NO: 2512 - DNA, 20 bp, Artificial Sequence
  Description of Artificial Sequence: Synthetic oligonucleotide
acaggaacaggaatattacc

SEQ ID NO: 2513 - DNA, 20 bp, Artificial Sequence
  Description of Artificial Sequence: Synthetic oligonucleotide
gatatccacgccatttcacc

SEQ ID NO: 2514 - DNA, 20 bp, Artificial Sequence
  Description of Artificial Sequence: Synthetic oligonucleotide
actcacgtgagcaccgggat

SEQ ID NO: 2515 - DNA, 20 bp, Artificial Sequence
  Description of Artificial Sequence: Synthetic oligonucleotide
gactcacgtgagcaccggga

SEQ ID NO: 2516 - DNA, 20 bp, Artificial Sequence
  Description of Artificial Sequence: Synthetic oligonucleotide
cacctgtgaggaaaaggacg

SEQ ID NO: 2517 - DNA, 20 bp, Artificial Sequence
  Description of Artificial Sequence: Synthetic oligonucleotide
ccacctgtgaggaaaaggac

SEQ ID NO: 2518 - DNA, 20 bp, Artificial Sequence
  Description of Artificial Sequence: Synthetic oligonucleotide
gactcactgagacaaagtag

SEQ ID NO: 2519 - DNA, 20 bp, Artificial Sequence
  Description of Artificial Sequence: Synthetic oligonucleotide
accacctgtgaggaaaagga

SEQ ID NO: 2520 - DNA, 20 bp, Artificial Sequence
  Description of Artificial Sequence: Synthetic oligonucleotide
ggactcactgagacaaagta

SEQ ID NO: 2521 - DNA, 20 bp, Artificial Sequence
  Description of Artificial Sequence: Synthetic oligonucleotide
gggactcactgagacaaagt

SEQ ID NO: 2522 - DNA, 20 bp, Artificial Sequence
  Description of Artificial Sequence: Synthetic oligonucleotide
ttacttggcaggctttccaa

SEQ ID NO: 2523 - DNA, 20 bp, Artificial Sequence
  Description of Artificial Sequence: Synthetic oligonucleotide
cagtacctggggggagagaa

SEQ ID NO: 2524 - DNA, 20 bp, Artificial Sequence
  Description of Artificial Sequence: Synthetic oligonucleotide
ccagtacctggggggagaga

SEQ ID NO: 2525 - DNA, 20 bp, Artificial Sequence
  Description of Artificial Sequence: Synthetic oligonucleotide
ttgtgctggaggcaccagaa

SEQ ID NO: 2526 - DNA, 20 bp, Artificial Sequence
  Description of Artificial Sequence: Synthetic oligonucleotide
attgtgctggaggcaccaga

SEQ ID NO: 2527 - DNA, 20 bp, Artificial Sequence
  Description of Artificial Sequence: Synthetic oligonucleotide
cccaacgctgacagagagaa

SEQ ID NO: 2528 - DNA, 20 bp, Artificial Sequence
  Description of Artificial Sequence: Synthetic oligonucleotide
gtcacctgaggacagaaagg

SEQ ID NO: 2529 - DNA, 20 bp, Artificial Sequence
  Description of Artificial Sequence: Synthetic oligonucleotide
gccgtcacctgaggacagaa

SEQ ID NO: 2530 - DNA, 20 bp, Artificial Sequence
  Description of Artificial Sequence: Synthetic oligonucleotide
ttccagttctaaggggagcg

SEQ ID NO: 2531 - DNA, 20 bp, Artificial Sequence
  Description of Artificial Sequence: Synthetic oligonucleotide
tcacctgaaatgacaatgat

SEQ ID NO: 2532 - DNA, 20 bp, Artificial Sequence
  Description of Artificial Sequence: Synthetic oligonucleotide
catccaacctgaagaccaaa

SEQ ID NO: 2533 - DNA, 20 bp, Artificial Sequence
  Description of Artificial Sequence: Synthetic oligonucleotide
gatctctgagtggaaagaac

SEQ ID NO: 2534 - DNA, 20 bp, Artificial Sequence
  Description of Artificial Sequence: Synthetic oligonucleotide
aggacgcgcatccccggggc

SEQ ID NO: 2535 - DNA, 20 bp, Artificial Sequence
  Description of Artificial Sequence: Synthetic oligonucleotide
tcccacaggtaagcgggtga

SEQ ID NO: 2536 - DNA, 20 bp, Artificial Sequence
  Description of Artificial Sequence: Synthetic oligonucleotide
ggcgctacgagccttcccac

SEQ ID NO: 2537 - DNA, 20 bp, Artificial Sequence
  Description of Artificial Sequence: Synthetic oligonucleotide
cccactcacccatggggcag

SEQ ID NO: 2538 - DNA, 20 bp, Artificial Sequence
  Description of Artificial Sequence: Synthetic oligonucleotide
cgacacagcagtgcccacag

SEQ ID NO: 2539 - DNA, 20 bp, Artificial Sequence
  Description of Artificial Sequence: Synthetic oligonucleotide
gtcgtctaagggacacagac

SEQ ID NO: 2540 - DNA, 20 bp, Artificial Sequence
  Description of Artificial Sequence: Synthetic oligonucleotide
tcgtctaagggacacagaca

SEQ ID NO: 2541 - DNA, 20 bp, Artificial Sequence
  Description of Artificial Sequence: Synthetic oligonucleotide
cgtctaagggacacagacag

SEQ ID NO: 2542 - DNA, 20 bp, Artificial Sequence
  Description of Artificial Sequence: Synthetic oligonucleotide
cccccaggccaagcccaccc

SEQ ID NO: 2543 - DNA, 20 bp, Artificial Sequence
  Description of Artificial Sequence: Synthetic oligonucleotide
aaattacctggatctgaact

SEQ ID NO: 2544 - DNA, 20 bp, Artificial Sequence
  Description of Artificial Sequence: Synthetic oligonucleotide
tcatctaagggacacagatg

SEQ ID NO: 2545 - DNA, 20 bp, Artificial Sequence
  Description of Artificial Sequence: Synthetic oligonucleotide
gtgctgcggggagaagccca

SEQ ID NO: 2546 - DNA, 20 bp, Artificial Sequence
  Description of Artificial Sequence: Synthetic oligonucleotide
accattacctgcatccagaa

SEQ ID NO: 2547 - DNA, 20 bp, Artificial Sequence
  Description of Artificial Sequence: Synthetic oligonucleotide
ccattacctgcatccagaac

SEQ ID NO: 2548 - DNA, 20 bp, Artificial Sequence
  Description of Artificial Sequence: Synthetic oligonucleotide
ccccactcagagcttgctgg

SEQ ID NO: 2549 - DNA, 20 bp, Artificial Sequence
  Description of Artificial Sequence: Synthetic oligonucleotide
acccagaagagcactggccc

SEQ ID NO: 2550 - DNA, 20 bp, Artificial Sequence
  Description of Artificial Sequence: Synthetic oligonucleotide
aggatcacccagaagagcac

SEQ ID NO: 2551 - DNA, 20 bp, Artificial Sequence
  Description of Artificial Sequence: Synthetic oligonucleotide
tggagctctgaaacgacacc

SEQ ID NO: 2552 - DNA, 20 bp, Artificial Sequence
  Description of Artificial Sequence: Synthetic oligonucleotide
agctctgaaacgacaccagg

SEQ ID NO: 2553 - DNA, 20 bp, Artificial Sequence
  Description of Artificial Sequence: Synthetic oligonucleotide
ctcacccacaagctctagct

SEQ ID NO: 2554 - DNA, 20 bp, Artificial Sequence
  Description of Artificial Sequence: Synthetic oligonucleotide
tcacccacaagctctagctt

SEQ ID NO: 2555 - DNA, 20 bp, Artificial Sequence
  Description of Artificial Sequence: Synthetic oligonucleotide
acttaccgttgagctcctcc

SEQ ID NO: 2556 - DNA, 20 bp, Artificial Sequence
  Description of Artificial Sequence: Synthetic oligonucleotide
cttaccgttgagctcctcct

SEQ ID NO: 2557 - DNA, 20 bp, Artificial Sequence
  Description of Artificial Sequence: Synthetic oligonucleotide
agctgctgtgggacgggaat

SEQ ID NO: 2558 - DNA, 20 bp, Artificial Sequence
  Description of Artificial Sequence: Synthetic oligonucleotide
cagctgctgtgggacgggaa

SEQ ID NO: 2559 - DNA, 20 bp, Artificial Sequence
  Description of Artificial Sequence: Synthetic oligonucleotide
ctcctcagctgctgtgggac

SEQ ID NO: 2560 - DNA, 20 bp, Artificial Sequence
  Description of Artificial Sequence: Synthetic oligonucleotide
gccgctgcaggatgccagcc

SEQ ID NO: 2561 - DNA, 20 bp, Artificial Sequence
  Description of Artificial Sequence: Synthetic oligonucleotide
tgactcaccaatcttgttat

SEQ ID NO: 2562 - DNA, 20 bp, Artificial Sequence
  Description of Artificial Sequence: Synthetic oligonucleotide
tctctgcaaggcaaaaggat

SEQ ID NO: 2563 - DNA, 20 bp, Artificial Sequence
  Description of Artificial Sequence: Synthetic oligonucleotide
ttctctgcaaggcaaaagga

SEQ ID NO: 2564 - DNA, 20 bp, Artificial Sequence
  Description of Artificial Sequence: Synthetic oligonucleotide
actcaccaacagcaggaccg

SEQ ID NO: 2565 - DNA, 20 bp, Artificial Sequence
  Description of Artificial Sequence: Synthetic oligonucleotide
gagacctgtggggacaaagc

SEQ ID NO: 2566 - DNA, 20 bp, Artificial Sequence
  Description of Artificial Sequence: Synthetic oligonucleotide
ctcaccctgtgcggcacttc

SEQ ID NO: 2567 - DNA, 20 bp, Artificial Sequence
  Description of Artificial Sequence: Synthetic oligonucleotide
acacctgggtacacacacag

SEQ ID NO: 2568 - DNA, 20 bp, Artificial Sequence
  Description of Artificial Sequence: Synthetic oligonucleotide
tgagctctggaaaaagacat

SEQ ID NO: 2569 - DNA, 20 bp, Artificial Sequence
  Description of Artificial Sequence: Synthetic oligonucleotide
ccggttcctgtaacacatag

SEQ ID NO: 2570 - DNA, 20 bp, Artificial Sequence
  Description of Artificial Sequence: Synthetic oligonucleotide
cggttcctgtaacacatagt

SEQ ID NO: 2571 - DNA, 20 bp, Artificial Sequence
  Description of Artificial Sequence: Synthetic oligonucleotide
gttcaccttgttgcaatagt

SEQ ID NO: 2572 - DNA, 20 bp, Artificial Sequence
  Description of Artificial Sequence: Synthetic oligonucleotide
ttcaccttgttgcaatagta

SEQ ID NO: 2573 - DNA, 20 bp, Artificial Sequence
  Description of Artificial Sequence: Synthetic oligonucleotide
tcaccttgttgcaatagtag

SEQ ID NO: 2574 - DNA, 20 bp, Artificial Sequence
  Description of Artificial Sequence: Synthetic oligonucleotide
tcacagctaagtgctcaact

SEQ ID NO: 2575 - DNA, 20 bp, Artificial Sequence
  Description of Artificial Sequence: Synthetic oligonucleotide
tgatactcaggccgccatca

SEQ ID NO: 2576 - DNA, 20 bp, Artificial Sequence
  Description of Artificial Sequence: Synthetic oligonucleotide
gatactcaggccgccatcaa

SEQ ID NO: 2577 - DNA, 20 bp, Artificial Sequence
  Description of Artificial Sequence: Synthetic oligonucleotide
gagaagagcaaaaacaggta

SEQ ID NO: 2578 - DNA, 20 bp, Artificial Sequence
  Description of Artificial Sequence: Synthetic oligonucleotide
agaagagcaaaaacaggtaa

SEQ ID NO: 2579 - DNA, 20 bp, Artificial Sequence
  Description of Artificial Sequence: Synthetic oligonucleotide
cgttaccttggatacaaggc

SEQ ID NO: 2580 - DNA, 20 bp, Artificial Sequence
  Description of Artificial Sequence: Synthetic oligonucleotide
tcaccatgcagcagcccctt

SEQ ID NO: 2581 - DNA, 20 bp, Artificial Sequence
  Description of Artificial Sequence: Synthetic oligonucleotide
tgggaaccagctccccatgc

SEQ ID NO: 2582 - DNA, 20 bp, Artificial Sequence
  Description of Artificial Sequence: Synthetic oligonucleotide
catgcagcaagtaagtgcaa

SEQ ID NO: 2583 - DNA, 20 bp, Artificial Sequence
  Description of Artificial Sequence: Synthetic oligonucleotide
tgcacttacttgctgcatgg

SEQ ID NO: 2584 - DNA, 20 bp, Artificial Sequence
  Description of Artificial Sequence: Synthetic oligonucleotide
gcacttacttgctgcatggt

SEQ ID NO: 2585 - DNA, 20 bp, Artificial Sequence
  Description of Artificial Sequence: Synthetic oligonucleotide
agctgcacaagttgtcaccc

SEQ ID NO: 2586 - DNA, 20 bp, Artificial Sequence
  Description of Artificial Sequence: Synthetic oligonucleotide
ctcccccacaaccggtggac

SEQ ID NO: 2587 - DNA, 20 bp, Artificial Sequence
  Description of Artificial Sequence: Synthetic oligonucleotide
ttattccagtccaccggttg

SEQ ID NO: 2588 - DNA, 20 bp, Artificial Sequence
  Description of Artificial Sequence: Synthetic oligonucleotide
tattccagtccaccggttgt

SEQ ID NO: 2589 - DNA, 20 bp, Artificial Sequence
  Description of Artificial Sequence: Synthetic oligonucleotide
attccagtccaccggttgtg

SEQ ID NO: 2590 - DNA, 20 bp, Artificial Sequence
  Description of Artificial Sequence: Synthetic oligonucleotide
ttccagtccaccggttgtgg

SEQ ID NO: 2591 - DNA, 20 bp, Artificial Sequence
  Description of Artificial Sequence: Synthetic oligonucleotide
gtccatggcgggcgcggcgg

SEQ ID NO: 2592 - DNA, 20 bp, Artificial Sequence
  Description of Artificial Sequence: Synthetic oligonucleotide
gacgtccatggcgggcgcgg

SEQ ID NO: 2593 - DNA, 20 bp, Artificial Sequence
  Description of Artificial Sequence: Synthetic oligonucleotide
tatgcagcagactcgcacag

SEQ ID NO: 2594 - DNA, 20 bp, Artificial Sequence
  Description of Artificial Sequence: Synthetic oligonucleotide
tttccgcagaaggtaagcag

SEQ ID NO: 2595 - DNA, 20 bp, Artificial Sequence
  Description of Artificial Sequence: Synthetic oligonucleotide
tcaaactagaatagagagag

SEQ ID NO: 2596 - DNA, 20 bp, Artificial Sequence
  Description of Artificial Sequence: Synthetic oligonucleotide
caaactagaatagagagaga

SEQ ID NO: 2597 - DNA, 20 bp, Artificial Sequence
  Description of Artificial Sequence: Synthetic oligonucleotide
cacccacctggctggttgac

SEQ ID NO: 2598 - DNA, 20 bp, Artificial Sequence
  Description of Artificial Sequence: Synthetic oligonucleotide
tggatctaagagaggaggac

SEQ ID NO: 2599 - DNA, 20 bp, Artificial Sequence
  Description of Artificial Sequence: Synthetic oligonucleotide
gatccaggagatggtccact

SEQ ID NO: 2600 - DNA, 20 bp, Artificial Sequence
  Description of Artificial Sequence: Synthetic oligonucleotide
gtcccagctcatctcgcaga

SEQ ID NO: 2601 - DNA, 20 bp, Artificial Sequence
  Description of Artificial Sequence: Synthetic oligonucleotide
tcatctcgcagatgggcatc

SEQ ID NO: 2602 - DNA, 20 bp, Artificial Sequence
  Description of Artificial Sequence: Synthetic oligonucleotide
ctccactcaggaagaggagt

SEQ ID NO: 2603 - DNA, 20 bp, Artificial Sequence
  Description of Artificial Sequence: Synthetic oligonucleotide
tgagccgcagaagcctgtgt

SEQ ID NO: 2604 - DNA, 20 bp, Artificial Sequence
  Description of Artificial Sequence: Synthetic oligonucleotide
agacactcaggccgccatca

SEQ ID NO: 2605 - DNA, 20 bp, Artificial Sequence
  Description of Artificial Sequence: Synthetic oligonucleotide
gacactcaggccgccatcaa

SEQ ID NO: 2606 - DNA, 20 bp, Artificial Sequence
  Description of Artificial Sequence: Synthetic oligonucleotide
gacctgcaggccttccgcag

SEQ ID NO: 2607 - DNA, 20 bp, Artificial Sequence
  Description of Artificial Sequence: Synthetic oligonucleotide
acctgcaggccttccgcagt

SEQ ID NO: 2608 - DNA, 20 bp, Artificial Sequence
  Description of Artificial Sequence: Synthetic oligonucleotide
cctgcaggccttccgcagtg

SEQ ID NO: 2609 - DNA, 20 bp, Artificial Sequence
  Description of Artificial Sequence: Synthetic oligonucleotide
ctgcttacctgtggccctgg

SEQ ID NO: 2610 - DNA, 20 bp, Artificial Sequence
  Description of Artificial Sequence: Synthetic oligonucleotide
ggaagtcctacagagtggga

SEQ ID NO: 2611 - DNA, 20 bp, Artificial Sequence
  Description of Artificial Sequence: Synthetic oligonucleotide
agtcctacagagtgggaagg

SEQ ID NO: 2612 - DNA, 20 bp, Artificial Sequence
  Description of Artificial Sequence: Synthetic oligonucleotide
gtcccagtccccgctgctgg

SEQ ID NO: 2613 - DNA, 20 bp, Artificial Sequence
  Description of Artificial Sequence: Synthetic oligonucleotide
tcccagtccccgctgctggt

SEQ ID NO: 2614 - DNA, 20 bp, Artificial Sequence
  Description of Artificial Sequence: Synthetic oligonucleotide
gctgtcccagtccccgctgc

SEQ ID NO: 2615 - DNA, 20 bp, Artificial Sequence
  Description of Artificial Sequence: Synthetic oligonucleotide
caggctgtgagagagaggag

SEQ ID NO: 2616 - DNA, 20 bp, Artificial Sequence
  Description of Artificial Sequence: Synthetic oligonucleotide
gcaggctgtgagagagagga

SEQ ID NO: 2617 - DNA, 20 bp, Artificial Sequence
  Description of Artificial Sequence: Synthetic oligonucleotide
agcaggctgtgagagagagg

SEQ ID NO: 2618 - DNA, 20 bp, Artificial Sequence
  Description of Artificial Sequence: Synthetic oligonucleotide
tgccatctcttcctgccctt

SEQ ID NO: 2619 - DNA, 20 bp, Artificial Sequence
  Description of Artificial Sequence: Synthetic oligonucleotide
gtactcacgcggtgtgcacc

SEQ ID NO: 2620 - DNA, 20 bp, Artificial Sequence
  Description of Artificial Sequence: Synthetic oligonucleotide
ggaagtgcctgggtgaggac

SEQ ID NO: 2621 - DNA, 20 bp, Artificial Sequence
  Description of Artificial Sequence: Synthetic oligonucleotide
agggtctagaaaagaggcaa

SEQ ID NO: 2622 - DNA, 20 bp, Artificial Sequence
  Description of Artificial Sequence: Synthetic oligonucleotide
gggtctagaaaagaggcaaa

SEQ ID NO: 2623 - DNA, 20 bp, Artificial Sequence
  Description of Artificial Sequence: Synthetic oligonucleotide
ggtctagaaaagaggcaaag

SEQ ID NO: 2624 - DNA, 20 bp, Artificial Sequence
  Description of Artificial Sequence: Synthetic oligonucleotide
ggtagcctggggggtggggc

SEQ ID NO: 2625 - DNA, 20 bp, Artificial Sequence
  Description of Artificial Sequence: Synthetic oligonucleotide
cccctggaaaatagtgaaaa

SEQ ID NO: 2626 - DNA, 20 bp, Artificial Sequence
  Description of Artificial Sequence: Synthetic oligonucleotide
ctgaccttccaggatgagtt

SEQ ID NO: 2627 - DNA, 20 bp, Artificial Sequence
  Description of Artificial Sequence: Synthetic oligonucleotide
gaggttctcactgaccttcc

SEQ ID NO: 2628 - DNA, 20 bp, Artificial Sequence
  Description of Artificial Sequence: Synthetic oligonucleotide
gcgggcctggaaggatgaga

SEQ ID NO: 2629 - DNA, 20 bp, Artificial Sequence
  Description of Artificial Sequence: Synthetic oligonucleotide
gcgtacctttctcacgagtt

SEQ ID NO: 2630 - DNA, 20 bp, Artificial Sequence
  Description of Artificial Sequence: Synthetic oligonucleotide
cgcgtacctttctcacgagt

SEQ ID NO: 2631 - DNA, 20 bp, Artificial Sequence
  Description of Artificial Sequence: Synthetic oligonucleotide
ggcccgtacctcggtagctg

SEQ ID NO: 2632 - DNA, 20 bp, Artificial Sequence
  Description of Artificial Sequence: Synthetic oligonucleotide
gtcccagttctccgccctcc

SEQ ID NO: 2633 - DNA, 20 bp, Artificial Sequence
  Description of Artificial Sequence: Synthetic oligonucleotide
ggaacaagccagggtcatgt

SEQ ID NO: 2634 - DNA, 20 bp, Artificial Sequence
  Description of Artificial Sequence: Synthetic oligonucleotide
caacccctccatctcccagc

SEQ ID NO: 2635 - DNA, 20 bp, Artificial Sequence
  Description of Artificial Sequence: Synthetic oligonucleotide
tgacctatcgggacaagcaa

SEQ ID NO: 2636 - DNA, 20 bp, Artificial Sequence
  Description of Artificial Sequence: Synthetic oligonucleotide
agtacctggcagtgtgatat

SEQ ID NO: 2637 - DNA, 20 bp, Artificial Sequence
  Description of Artificial Sequence: Synthetic oligonucleotide
atgtgcagaaagacctggag

SEQ ID NO: 2638 - DNA, 20 bp, Artificial Sequence
  Description of Artificial Sequence: Synthetic oligonucleotide
gggcagcccgcctccgccgc

SEQ ID NO: 2639 - DNA, 20 bp, Artificial Sequence
  Description of Artificial Sequence: Synthetic oligonucleotide
cggccaggccctgccgctca

SEQ ID NO: 2640 - RNA, 20 nt, Artificial Sequence
  Description of Artificial Sequence: Synthetic oligonucleotide
ccaucggcucgcggcgagaa

SEQ ID NO: 2641 - RNA, 20 nt, Artificial Sequence
  Description of Artificial Sequence: Synthetic oligonucleotide
ccugucugggagagagaagc

SEQ ID NO: 2642 - RNA, 20 nt, Artificial Sequence
  Description of Artificial Sequence: Synthetic oligonucleotide
gcucaccuggcugagcagcc

SEQ ID NO: 2643 - RNA, 20 nt, Artificial Sequence
  Description of Artificial Sequence: Synthetic oligonucleotide
cucaccuggcugagcagcca

SEQ ID NO: 2644 - RNA, 20 nt, Artificial Sequence
  Description of Artificial Sequence: Synthetic oligonucleotide
accaaguucuggaacaaaag

SEQ ID NO: 2645 - RNA, 20 nt, Artificial Sequence
  Description of Artificial Sequence: Synthetic oligonucleotide
gccaaccuacagaaaaauug

SEQ ID NO: 2646 - RNA, 20 nt, Artificial Sequence
  Description of Artificial Sequence: Synthetic oligonucleotide
ccaaccuacagaaaaauuga

SEQ ID NO: 2647 - RNA, 20 nt, Artificial Sequence
  Description of Artificial Sequence: Synthetic oligonucleotide
agccuugcaggugaagagac

SEQ ID NO: 2648 - RNA, 20 nt, Artificial Sequence
  Description of Artificial Sequence: Synthetic oligonucleotide
cucaacucuuucuugucuuc

SEQ ID NO: 2649 - RNA, 20 nt, Artificial Sequence
  Description of Artificial Sequence: Synthetic oligonucleotide
ucaacucuuucuugucuuca

SEQ ID NO: 2650 - RNA, 20 nt, Artificial Sequence
  Description of Artificial Sequence: Synthetic oligonucleotide
cacuacuucaaggggagcag

SEQ ID NO: 2651 - RNA, 20 nt, Artificial Sequence
  Description of Artificial Sequence: Synthetic oligonucleotide
accuaccgaugugcucccgc

SEQ ID NO: 2652 - RNA, 20 nt, Artificial Sequence
  Description of Artificial Sequence: Synthetic oligonucleotide
cuggcgucuggggugagaua

SEQ ID NO: 2653 - RNA, 20 nt, Artificial Sequence
  Description of Artificial Sequence: Synthetic oligonucleotide
gaguuaccuuguggcauggc

SEQ ID NO: 2654 - RNA, 20 nt, Artificial Sequence
  Description of Artificial Sequence: Synthetic oligonucleotide
auccuaccuugcagggaucu

SEQ ID NO: 2655 - RNA, 20 nt, Artificial Sequence
  Description of Artificial Sequence: Synthetic oligonucleotide
ucacgugaaaggguagacca

SEQ ID NO: 2656 - RNA, 20 nt, Artificial Sequence
  Description of Artificial Sequence: Synthetic oligonucleotide
aucuaccugggcauaguuca

SEQ ID NO: 2657 - RNA, 20 nt, Artificial Sequence
  Description of Artificial Sequence: Synthetic oligonucleotide
ugauuaccuguccccaccaa

SEQ ID NO: 2658 - RNA, 20 nt, Artificial Sequence
  Description of Artificial Sequence: Synthetic oligonucleotide
ccccaaucugccaaggaaug

SEQ ID NO: 2659 - RNA, 20 nt, Artificial Sequence
  Description of Artificial Sequence: Synthetic oligonucleotide
ccauaccucagaggagaaca

SEQ ID NO: 2660 - RNA, 20 nt, Artificial Sequence
  Description of Artificial Sequence: Synthetic oligonucleotide
caagcuccugggcagagaug

SEQ ID NO: 2661 - RNA, 20 nt, Artificial Sequence
  Description of Artificial Sequence: Synthetic oligonucleotide
uuaucuagaaaugaacccaa

SEQ ID NO: 2662 - RNA, 20 nt, Artificial Sequence
  Description of Artificial Sequence: Synthetic oligonucleotide
ugggcauggccacagacgac

SEQ ID NO: 2663 - RNA, 20 nt, Artificial Sequence
  Description of Artificial Sequence: Synthetic oligonucleotide
cugcucaccggagcgggaug

SEQ ID NO: 2664 - RNA, 20 nt, Artificial Sequence
  Description of Artificial Sequence: Synthetic oligonucleotide
caguuguuccaaccuagcau

SEQ ID NO: 2665 - RNA, 20 nt, Artificial Sequence
  Description of Artificial Sequence: Synthetic oligonucleotide
cacucccagggcugcgggga

SEQ ID NO: 2666 - RNA, 20 nt, Artificial Sequence
  Description of Artificial Sequence: Synthetic oligonucleotide
ccacucccagggcugcgggg

SEQ ID NO: 2667 - RNA, 20 nt, Artificial Sequence
  Description of Artificial Sequence: Synthetic oligonucleotide
gcgacgacagcugaagcaga

SEQ ID NO: 2668 - RNA, 20 nt, Artificial Sequence
  Description of Artificial Sequence: Synthetic oligonucleotide
ggagagccagccucugccgg

SEQ ID NO: 2669 - RNA, 20 nt, Artificial Sequence
  Description of Artificial Sequence: Synthetic oligonucleotide
acaugagccagagaggggcg

SEQ ID NO: 2670 - RNA, 20 nt, Artificial Sequence
  Description of Artificial Sequence: Synthetic oligonucleotide
gaggcagcaagaaccuuuca

SEQ ID NO: 2671 - RNA, 20 nt, Artificial Sequence
  Description of Artificial Sequence: Synthetic oligonucleotide
uggcccacacuccuggcggg

SEQ ID NO: 2672 - RNA, 20 nt, Artificial Sequence
  Description of Artificial Sequence: Synthetic oligonucleotide
cguuggcccacacuccuggc

SEQ ID NO: 2673 - RNA, 20 nt, Artificial Sequence
  Description of Artificial Sequence: Synthetic oligonucleotide
cugggacucuugggcacucc

SEQ ID NO: 2674 - RNA, 20 nt, Artificial Sequence
  Description of Artificial Sequence: Synthetic oligonucleotide
ugcgugccuggaggggagau

SEQ ID NO: 2675 - RNA, 20 nt, Artificial Sequence
  Description of Artificial Sequence: Synthetic oligonucleotide
cugcgugccuggaggggaga

SEQ ID NO: 2676 - RNA, 20 nt, Artificial Sequence
  Description of Artificial Sequence: Synthetic oligonucleotide
ggugauucugacagggcaag

SEQ ID NO: 2677 - RNA, 20 nt, Artificial Sequence
  Description of Artificial Sequence: Synthetic oligonucleotide
aagccuagcggggugggcag

SEQ ID NO: 2678 - RNA, 20 nt, Artificial Sequence
  Description of Artificial Sequence: Synthetic oligonucleotide
cggacucaccuggaacaugc

SEQ ID NO: 2679 - RNA, 20 nt, Artificial Sequence
  Description of Artificial Sequence: Synthetic oligonucleotide
agcccuagggagucauauga

SEQ ID NO: 2680 - RNA, 20 nt, Artificial Sequence
  Description of Artificial Sequence: Synthetic oligonucleotide
cagcccuagggagucauaug

SEQ ID NO: 2681 - RNA, 20 nt, Artificial Sequence
  Description of Artificial Sequence: Synthetic oligonucleotide
ucucaccugcagggugcagu

SEQ ID NO: 2682 - RNA, 20 nt, Artificial Sequence
  Description of Artificial Sequence: Synthetic oligonucleotide
gucucaccugcagggugcag

SEQ ID NO: 2683 - RNA, 20 nt, Artificial Sequence
  Description of Artificial Sequence: Synthetic oligonucleotide
cacagccugaggagaggcaa

SEQ ID NO: 2684 - RNA, 20 nt, Artificial Sequence
  Description of Artificial Sequence: Synthetic oligonucleotide
gcacagccugaggagaggca

SEQ ID NO: 2685 - RNA, 20 nt, Artificial Sequence
  Description of Artificial Sequence: Synthetic oligonucleotide
gcacuggaggacagggaaga

SEQ ID NO: 2686 - RNA, 20 nt, Artificial Sequence
  Description of Artificial Sequence: Synthetic oligonucleotide
ggcacuggaggacagggaag

SEQ ID NO: 2687 - RNA, 20 nt, Artificial Sequence
  Description of Artificial Sequence: Synthetic oligonucleotide
cacccaccucuggggugucc

SEQ ID NO: 2688 - RNA, 20 nt, Artificial Sequence
  Description of Artificial Sequence: Synthetic oligonucleotide
gcaccuaggagguccagaag

SEQ ID NO: 2689 - RNA, 20 nt, Artificial Sequence
  Description of Artificial Sequence: Synthetic oligonucleotide
cccuuacccagcugguggac

SEQ ID NO: 2690 - RNA, 20 nt, Artificial Sequence
  Description of Artificial Sequence: Synthetic oligonucleotide
cuucacuaucaggggguaug

SEQ ID NO: 2691 - RNA, 20 nt, Artificial Sequence
  Description of Artificial Sequence: Synthetic oligonucleotide
ucacuuacagguagcuucag

SEQ ID NO: 2692 - RNA, 20 nt, Artificial Sequence
  Description of Artificial Sequence: Synthetic oligonucleotide
guucacugcaugcaagguug

SEQ ID NO: 2693 - RNA, 20 nt, Artificial Sequence
  Description of Artificial Sequence: Synthetic oligonucleotide
uguucacugcaugcaagguu

SEQ ID NO: 2694 - RNA, 20 nt, Artificial Sequence
  Description of Artificial Sequence: Synthetic oligonucleotide
cuguucacugcaugcaaggu

SEQ ID NO: 2695 - RNA, 20 nt, Artificial Sequence
  Description of Artificial Sequence: Synthetic oligonucleotide
cucuccuguggggggccaga

SEQ ID NO: 2696 - RNA, 20 nt, Artificial Sequence
  Description of Artificial Sequence: Synthetic oligonucleotide
acucuccuguggggggccag

SEQ ID NO: 2697 - RNA, 20 nt, Artificial Sequence
  Description of Artificial Sequence: Synthetic oligonucleotide
gcaacuugagggagagagaa

SEQ ID NO: 2698 - RNA, 20 nt, Artificial Sequence
  Description of Artificial Sequence: Synthetic oligonucleotide
agguacuggggagccaaggc

SEQ ID NO: 2699 - RNA, 20 nt, Artificial Sequence
  Description of Artificial Sequence: Synthetic oligonucleotide
accuaccacaucgcucuugc

SEQ ID NO: 2700 - RNA, 20 nt, Artificial Sequence
  Description of Artificial Sequence: Synthetic oligonucleotide
ggaccacugugaggggcaga

SEQ ID NO: 2701 - RNA, 20 nt, Artificial Sequence
  Description of Artificial Sequence: Synthetic oligonucleotide
aggaccacugugaggggcag

SEQ ID NO: 2702 - RNA, 20 nt, Artificial Sequence
  Description of Artificial Sequence: Synthetic oligonucleotide
auaccuagggcagcaaaaug

SEQ ID NO: 2703 - RNA, 20 nt, Artificial Sequence
  Description of Artificial Sequence: Synthetic oligonucleotide
gaggcauggcugaaaucuuc

SEQ ID NO: 2704 - RNA, 20 nt, Artificial Sequence
  Description of Artificial Sequence: Synthetic oligonucleotide
ucuaccuguuugccaggggg

SEQ ID NO: 2705 - RNA, 20 nt, Artificial Sequence
  Description of Artificial Sequence: Synthetic oligonucleotide
gacucuaccuguuugccagg

SEQ ID NO: 2706 - RNA, 20 nt, Artificial Sequence
  Description of Artificial Sequence: Synthetic oligonucleotide
aguccugggaagcagagacg

SEQ ID NO: 2707 - RNA, 20 nt, Artificial Sequence
  Description of Artificial Sequence: Synthetic oligonucleotide
gaguccugggaagcagagac

SEQ ID NO: 2708 - RNA, 20 nt, Artificial Sequence
  Description of Artificial Sequence: Synthetic oligonucleotide
ugaguccugggaagcagaga

SEQ ID NO: 2709 - RNA, 20 nt, Artificial Sequence
  Description of Artificial Sequence: Synthetic oligonucleotide
acuuaccaggugcagggugu

SEQ ID NO: 2710 - RNA, 19 nt, Artificial Sequence
  Description of Artificial Sequence: Synthetic oligonucleotide
gguagacaauugcagccug

SEQ ID NO: 2711 - RNA, 20 nt, Artificial Sequence
  Description of Artificial Sequence: Synthetic oligonucleotide
gccuccccagcucagaccug

SEQ ID NO: 2712 - RNA, 20 nt, Artificial Sequence
  Description of Artificial Sequence: Synthetic oligonucleotide
ucccuacagacagagccaca

SEQ ID NO: 2713 - RNA, 20 nt, Artificial Sequence
  Description of Artificial Sequence: Synthetic oligonucleotide
gagccacaagguaauccuga

SEQ ID NO: 2714 - RNA, 20 nt, Artificial Sequence
  Description of Artificial Sequence: Synthetic oligonucleotide
gcccaagaguugcggcguau

SEQ ID NO: 2715 - RNA, 20 nt, Artificial Sequence
  Description of Artificial Sequence: Synthetic oligonucleotide
aaaauaccugaaacaacaaa

SEQ ID NO: 2716 - RNA, 20 nt, Artificial Sequence
  Description of Artificial Sequence: Synthetic oligonucleotide
caaugacugcaaagauacaa

SEQ ID NO: 2717 - RNA, 20 nt, Artificial Sequence
  Description of Artificial Sequence: Synthetic oligonucleotide
acaaugacugcaaagauaca

SEQ ID NO: 2718 - RNA, 20 nt, Artificial Sequence
  Description of Artificial Sequence: Synthetic oligonucleotide
aaugacugcaugcaaacacc

SEQ ID NO: 2719 - RNA, 20 nt, Artificial Sequence
  Description of Artificial Sequence: Synthetic oligonucleotide
augacugcaugcaaacacca

SEQ ID NO: 2720 - RNA, 20 nt, Artificial Sequence
  Description of Artificial Sequence: Synthetic oligonucleotide
ugacugcaugcaaacaccag

SEQ ID NO: 2721 - RNA, 20 nt, Artificial Sequence
  Description of Artificial Sequence: Synthetic oligonucleotide
uacucaccuucaggucccga

SEQ ID NO: 2722 - RNA, 20 nt, Artificial Sequence
  Description of Artificial Sequence: Synthetic oligonucleotide
acucaccaaaccacgccugc

SEQ ID NO: 2723 - RNA, 20 nt, Artificial Sequence
  Description of Artificial Sequence: Synthetic oligonucleotide
uaacuuaccuuuacuccauc

SEQ ID NO: 2724 - RNA, 20 nt, Artificial Sequence
  Description of Artificial Sequence: Synthetic oligonucleotide
agguauaccagcgcuggggu

SEQ ID NO: 2725 - RNA, 20 nt, Artificial Sequence
  Description of Artificial Sequence: Synthetic oligonucleotide
ugaauaccuuguuuccauca

SEQ ID NO: 2726 - RNA, 20 nt, Artificial Sequence
  Description of Artificial Sequence: Synthetic oligonucleotide
cugaauaccuuguuuccauc

SEQ ID NO: 2727 - RNA, 20 nt, Artificial Sequence
  Description of Artificial Sequence: Synthetic oligonucleotide
ucgugcuaaaggcaaaaaua

SEQ ID NO: 2728 - RNA, 20 nt, Artificial Sequence
  Description of Artificial Sequence: Synthetic oligonucleotide
agcucaccaucgugggccug

SEQ ID NO: 2729 - RNA, 20 nt, Artificial Sequence
  Description of Artificial Sequence: Synthetic oligonucleotide
aagcucaccaucgugggccu

SEQ ID NO: 2730 - RNA, 20 nt, Artificial Sequence
  Description of Artificial Sequence: Synthetic oligonucleotide
aaagcucaccaucgugggcc

SEQ ID NO: 2731 - RNA, 20 nt, Artificial Sequence
  Description of Artificial Sequence: Synthetic oligonucleotide
auccuagucagaggaggaaa

SEQ ID NO: 2732 - RNA, 20 nt, Artificial Sequence
  Description of Artificial Sequence: Synthetic oligonucleotide
guuauccugggguuguguac

SEQ ID NO: 2733 - RNA, 20 nt, Artificial Sequence
  Description of Artificial Sequence: Synthetic oligonucleotide
gaaccuucaaaggaccaaga

SEQ ID NO: 2734 - RNA, 20 nt, Artificial Sequence
  Description of Artificial Sequence: Synthetic oligonucleotide
ucacccgcuccacccuuucc

SEQ ID NO: 2735 - RNA, 20 nt, Artificial Sequence
  Description of Artificial Sequence: Synthetic oligonucleotide
auaaucuaagucaaaauaaa

SEQ ID NO: 2736 - RNA, 20 nt, Artificial Sequence
  Description of Artificial Sequence: Synthetic oligonucleotide
aguccaucuuuuuaaaaggc

SEQ ID NO: 2737 - RNA, 20 nt, Artificial Sequence
  Description of Artificial Sequence: Synthetic oligonucleotide
caugacccuguggugggaaa

SEQ ID NO: 2738 - RNA, 20 nt, Artificial Sequence
  Description of Artificial Sequence: Synthetic oligonucleotide
uuaccauuugaaaauucauc

SEQ ID NO: 2739 - RNA, 20 nt, Artificial Sequence
  Description of Artificial Sequence: Synthetic oligonucleotide
cauacagucaguaucaauuc

SEQ ID NO: 2740 - RNA, 20 nt, Artificial Sequence
  Description of Artificial Sequence: Synthetic oligonucleotide
ggugucgaaaugagaagaag

SEQ ID NO: 2741 - RNA, 20 nt, Artificial Sequence
  Description of Artificial Sequence: Synthetic oligonucleotide
augcaggugacagagacucu

SEQ ID NO: 2742 - RNA, 20 nt, Artificial Sequence
  Description of Artificial Sequence: Synthetic oligonucleotide
uggggagcaggaaauaucug

SEQ ID NO: 2743 - RNA, 20 nt, Artificial Sequence
  Description of Artificial Sequence: Synthetic oligonucleotide
cacgcaccuggacagcugac

SEQ ID NO: 2744 - RNA, 20 nt, Artificial Sequence
  Description of Artificial Sequence: Synthetic oligonucleotide
ucucaaaaccaaagaucucc

SEQ ID NO: 2745 - RNA, 20 nt, Artificial Sequence
  Description of Artificial Sequence: Synthetic oligonucleotide
caacacaacccugaccugug

SEQ ID NO: 2746 - RNA, 20 nt, Artificial Sequence
  Description of Artificial Sequence: Synthetic oligonucleotide
aaacagaggagucggagaaa

SEQ ID NO: 2747 - RNA, 20 nt, Artificial Sequence
  Description of Artificial Sequence: Synthetic oligonucleotide
ucaccaaaaggaaaaaacag

SEQ ID NO: 2748 - RNA, 20 nt, Artificial Sequence
  Description of Artificial Sequence: Synthetic oligonucleotide
acacaaguucaccagcagaa

SEQ ID NO: 2749 - RNA, 20 nt, Artificial Sequence
  Description of Artificial Sequence: Synthetic oligonucleotide
guucagccaaaaccucccca

SEQ ID NO: 2750 - RNA, 20 nt, Artificial Sequence
  Description of Artificial Sequence: Synthetic oligonucleotide
cuugggucaggacaucaacu

SEQ ID NO: 2751 - RNA, 20 nt, Artificial Sequence
  Description of Artificial Sequence: Synthetic oligonucleotide
cgaugaucaggauaucuaca

SEQ ID NO: 2752 - RNA, 20 nt, Artificial Sequence
  Description of Artificial Sequence: Synthetic oligonucleotide
agccuuaccuugcgagagaa

SEQ ID NO: 2753 - RNA, 20 nt, Artificial Sequence
  Description of Artificial Sequence: Synthetic oligonucleotide
uagccuuaccuugcgagaga

SEQ ID NO: 2754 - RNA, 20 nt, Artificial Sequence
  Description of Artificial Sequence: Synthetic oligonucleotide
ucgcaagguaaggcuacucc

SEQ ID NO: 2755 - RNA, 20 nt, Artificial Sequence
  Description of Artificial Sequence: Synthetic oligonucleotide
ggcacacugugggggaaggg

SEQ ID NO: 2756 - RNA, 20 nt, Artificial Sequence
  Description of Artificial Sequence: Synthetic oligonucleotide
gugccagagcuguguggagc

SEQ ID NO: 2757 - RNA, 20 nt, Artificial Sequence
  Description of Artificial Sequence: Synthetic oligonucleotide
ccgacacacaagcucuguug

SEQ ID NO: 2758 - RNA, 20 nt, Artificial Sequence
  Description of Artificial Sequence: Synthetic oligonucleotide
ggucuaucaggugagcguug

SEQ ID NO: 2759 - RNA, 20 nt, Artificial Sequence
  Description of Artificial Sequence: Synthetic oligonucleotide
gaugcucaguacagccaccu

SEQ ID NO: 2760 - RNA, 20 nt, Artificial Sequence
  Description of Artificial Sequence: Synthetic oligonucleotide
ccgacugcaucuuuguuuca

SEQ ID NO: 2761 - RNA, 20 nt, Artificial Sequence
  Description of Artificial Sequence: Synthetic oligonucleotide
acucaccugauaagaggcag

SEQ ID NO: 2762 - RNA, 20 nt, Artificial Sequence
  Description of Artificial Sequence: Synthetic oligonucleotide
uaccaccugaaaaugaaaaa

SEQ ID NO: 2763 - RNA, 20 nt, Artificial Sequence
  Description of Artificial Sequence: Synthetic oligonucleotide
acacagacacgugaguuuau

SEQ ID NO: 2764 - RNA, 20 nt, Artificial Sequence
  Description of Artificial Sequence: Synthetic oligonucleotide
uauaugcuggggagaaagaa

SEQ ID NO: 2765 - RNA, 20 nt, Artificial Sequence
  Description of Artificial Sequence: Synthetic oligonucleotide
uuauaugcuggggagaaaga

SEQ ID NO: 2766 - RNA, 20 nt, Artificial Sequence
  Description of Artificial Sequence: Synthetic oligonucleotide
cuggauuaccucuugcccuc

SEQ ID NO: 2767 - RNA, 20 nt, Artificial Sequence
  Description of Artificial Sequence: Synthetic oligonucleotide
acacugugggggguggggug

SEQ ID NO: 2768 - RNA, 20 nt, Artificial Sequence
  Description of Artificial Sequence: Synthetic oligonucleotide
cacacugugggggguggggu

SEQ ID NO: 2769 - RNA, 20 nt, Artificial Sequence
  Description of Artificial Sequence: Synthetic oligonucleotide
acacacuguggggggugggg

SEQ ID NO: 2770 - RNA, 20 nt, Artificial Sequence
  Description of Artificial Sequence: Synthetic oligonucleotide
uuguccugcggaggaaggag

SEQ ID NO: 2771 - RNA, 20 nt, Artificial Sequence
  Description of Artificial Sequence: Synthetic oligonucleotide
uuuguccugcggaggaagga

SEQ ID NO: 2772 - RNA, 20 nt, Artificial Sequence
  Description of Artificial Sequence: Synthetic oligonucleotide
uuuuguccugcggaggaagg

SEQ ID NO: 2773 - RNA, 20 nt, Artificial Sequence
  Description of Artificial Sequence: Synthetic oligonucleotide
guuaccucauagucuggguu

SEQ ID NO: 2774 - RNA, 20 nt, Artificial Sequence
  Description of Artificial Sequence: Synthetic oligonucleotide
cguuaccucauagucugggu

SEQ ID NO: 2775 - RNA, 20 nt, Artificial Sequence
  Description of Artificial Sequence: Synthetic oligonucleotide
cauggaacaggggaagggcc

SEQ ID NO: 2776 - RNA, 20 nt, Artificial Sequence
  Description of Artificial Sequence: Synthetic oligonucleotide
cuucaagguaagggccuacu

SEQ ID NO: 2777 - RNA, 20 nt, Artificial Sequence
  Description of Artificial Sequence: Synthetic oligonucleotide
ucuccuaccuuugauugacu

SEQ ID NO: 2778 - RNA, 20 nt, Artificial Sequence
  Description of Artificial Sequence: Synthetic oligonucleotide
uucuccuaccuuugauugac

SEQ ID NO: 2779 - RNA, 20 nt, Artificial Sequence
  Description of Artificial Sequence: Synthetic oligonucleotide
uggcccagucaaucaaaggu

SEQ ID NO: 2780 - RNA, 20 nt, Artificial Sequence
  Description of Artificial Sequence: Synthetic oligonucleotide
acauacuucuguaauacacu

SEQ ID NO: 2781 - RNA, 20 nt, Artificial Sequence
  Description of Artificial Sequence: Synthetic oligonucleotide
ugacuaucaagaagaugguu

SEQ ID NO: 2782 - RNA, 20 nt, Artificial Sequence
  Description of Artificial Sequence: Synthetic oligonucleotide
uuuaaaccaugugauauuuu

SEQ ID NO: 2783 - RNA, 20 nt, Artificial Sequence
  Description of Artificial Sequence: Synthetic oligonucleotide
cucuuccauuggguacauaa

SEQ ID NO: 2784 - RNA, 20 nt, Artificial Sequence
  Description of Artificial Sequence: Synthetic oligonucleotide
ugaccagcucuaccagguaa

SEQ ID NO: 2785 - RNA, 20 nt, Artificial Sequence
  Description of Artificial Sequence: Synthetic oligonucleotide
gaccaguacagccaccuuca

SEQ ID NO: 2786 - RNA, 20 nt, Artificial Sequence
  Description of Artificial Sequence: Synthetic oligonucleotide
accuucaaggaaaccaguug

SEQ ID NO: 2787 - RNA, 20 nt, Artificial Sequence
  Description of Artificial Sequence: Synthetic oligonucleotide
gguucauuguggccuugccg

SEQ ID NO: 2788 - RNA, 20 nt, Artificial Sequence
  Description of Artificial Sequence: Synthetic oligonucleotide
gagcgcuaaguggaaaagaa

SEQ ID NO: 2789 - RNA, 20 nt, Artificial Sequence
  Description of Artificial Sequence: Synthetic oligonucleotide
aacccuaccuuuaguuaaga

SEQ ID NO: 2790 - RNA, 20 nt, Artificial Sequence
  Description of Artificial Sequence: Synthetic oligonucleotide
ggcagucacuguggagggaa

SEQ ID NO: 2791 - RNA, 20 nt, Artificial Sequence
  Description of Artificial Sequence: Synthetic oligonucleotide
uggaaagcuggaggugggaa

SEQ ID NO: 2792 - RNA, 20 nt, Artificial Sequence
  Description of Artificial Sequence: Synthetic oligonucleotide
ccucaccucucaucaccacc

SEQ ID NO: 2793 - RNA, 20 nt, Artificial Sequence
  Description of Artificial Sequence: Synthetic oligonucleotide
aguggcugcagaggaacgag

SEQ ID NO: 2794 - RNA, 20 nt, Artificial Sequence
  Description of Artificial Sequence: Synthetic oligonucleotide
gcgcuguccagggacaagaa

SEQ ID NO: 2795 - RNA, 20 nt, Artificial Sequence
  Description of Artificial Sequence: Synthetic oligonucleotide
uccuuacugaggacacuggc

SEQ ID NO: 2796 - RNA, 20 nt, Artificial Sequence
  Description of Artificial Sequence: Synthetic oligonucleotide
ccaucuggagcuuagggucc

SEQ ID NO: 2797 - RNA, 20 nt, Artificial Sequence
  Description of Artificial Sequence: Synthetic oligonucleotide
gguuggcauguggaggcagc

SEQ ID NO: 2798 - RNA, 20 nt, Artificial Sequence
  Description of Artificial Sequence: Synthetic oligonucleotide
gggucauaccagcugagccg

SEQ ID NO: 2799 - RNA, 20 nt, Artificial Sequence
  Description of Artificial Sequence: Synthetic oligonucleotide
uggaaaucugggggucagaa

SEQ ID NO: 2800 - RNA, 20 nt, Artificial Sequence
  Description of Artificial Sequence: Synthetic oligonucleotide
guuacccaccuaagcagguc

SEQ ID NO: 2801 - RNA, 20 nt, Artificial Sequence
  Description of Artificial Sequence: Synthetic oligonucleotide
ucugccagcggcugaacugu

SEQ ID NO: 2802 - RNA, 20 nt, Artificial Sequence
  Description of Artificial Sequence: Synthetic oligonucleotide
cugccagcggcugaacugug

SEQ ID NO: 2803 - RNA, 20 nt, Artificial Sequence
  Description of Artificial Sequence: Synthetic oligonucleotide
ccucccacugcuuggagcuc

SEQ ID NO: 2804 - RNA, 20 nt, Artificial Sequence
  Description of Artificial Sequence: Synthetic oligonucleotide
gaagugccagggccagcugg

SEQ ID NO: 2805 - RNA, 20 nt, Artificial Sequence
  Description of Artificial Sequence: Synthetic oligonucleotide
ccaugugccauccguccuug

SEQ ID NO: 2806 - RNA, 20 nt, Artificial Sequence
  Description of Artificial Sequence: Synthetic oligonucleotide
uuugcagccagagcuggggc

SEQ ID NO: 2807 - RNA, 20 nt, Artificial Sequence
  Description of Artificial Sequence: Synthetic oligonucleotide
gguucugcaaugagacacuc

SEQ ID NO: 2808 - RNA, 20 nt, Artificial Sequence
  Description of Artificial Sequence: Synthetic oligonucleotide
cuccagagcccacagguaag

SEQ ID NO: 2809 - RNA, 20 nt, Artificial Sequence
  Description of Artificial Sequence: Synthetic oligonucleotide
accacaacuccagagcccac

SEQ ID NO: 2810 - RNA, 20 nt, Artificial Sequence
  Description of Artificial Sequence: Synthetic oligonucleotide
gagcuaggagaggagagagc

SEQ ID NO: 2811 - RNA, 20 nt, Artificial Sequence
  Description of Artificial Sequence: Synthetic oligonucleotide
cucacuuaccugagcaaagg

SEQ ID NO: 2812 - RNA, 20 nt, Artificial Sequence
  Description of Artificial Sequence: Synthetic oligonucleotide
cugcagcugguggcacaguc

SEQ ID NO: 2813 - RNA, 20 nt, Artificial Sequence
  Description of Artificial Sequence: Synthetic oligonucleotide
gaucuuccauuggauuggca

SEQ ID NO: 2814 - RNA, 20 nt, Artificial Sequence
  Description of Artificial Sequence: Synthetic oligonucleotide
ugaggcccaggacaagaccc

SEQ ID NO: 2815 - RNA, 20 nt, Artificial Sequence
  Description of Artificial Sequence: Synthetic oligonucleotide
aaaccugagaggggaagcaa

SEQ ID NO: 2816 - RNA, 20 nt, Artificial Sequence
  Description of Artificial Sequence: Synthetic oligonucleotide
cucccaccgcagcgagcucc

SEQ ID NO: 2817 - RNA, 20 nt, Artificial Sequence
  Description of Artificial Sequence: Synthetic oligonucleotide
uuuccagcccaaggugcaga

SEQ ID NO: 2818 - RNA, 20 nt, Artificial Sequence
  Description of Artificial Sequence: Synthetic oligonucleotide
ggugcagagccgucuggugg

SEQ ID NO: 2819 - RNA, 20 nt, Artificial Sequence
  Description of Artificial Sequence: Synthetic oligonucleotide
aggugcagagccgucuggug

SEQ ID NO: 2820 - RNA, 20 nt, Artificial Sequence
  Description of Artificial Sequence: Synthetic oligonucleotide
uccuaucgagugcuggacgc

SEQ ID NO: 2821 - RNA, 20 nt, Artificial Sequence
  Description of Artificial Sequence: Synthetic oligonucleotide
aaggugcagagccgucuggu

SEQ ID NO: 2822 - RNA, 20 nt, Artificial Sequence
  Description of Artificial Sequence: Synthetic oligonucleotide
caaggugcagagccgucugg

SEQ ID NO: 2823 - RNA, 20 nt, Artificial Sequence
  Description of Artificial Sequence: Synthetic oligonucleotide
gggcugcccacugagccccc

SEQ ID NO: 2824 - RNA, 20 nt, Artificial Sequence
  Description of Artificial Sequence: Synthetic oligonucleotide
aggugcgccagggggcucag

SEQ ID NO: 2825 - RNA, 20 nt, Artificial Sequence
  Description of Artificial Sequence: Synthetic oligonucleotide
ggccaggauccaaaccccgc

SEQ ID NO: 2826 - RNA, 20 nt, Artificial Sequence
  Description of Artificial Sequence: Synthetic oligonucleotide
cgccaguggauuggcccaac

SEQ ID NO: 2827 - RNA, 20 nt, Artificial Sequence
  Description of Artificial Sequence: Synthetic oligonucleotide
gcgccaguggauuggcccaa

SEQ ID NO: 2828 - RNA, 20 nt, Artificial Sequence
  Description of Artificial Sequence: Synthetic oligonucleotide
aagaagcagcgccaguggau

SEQ ID NO: 2829 - RNA, 20 nt, Artificial Sequence
  Description of Artificial Sequence: Synthetic oligonucleotide
gcuuaccuggauaagcugac

SEQ ID NO: 2830 - RNA, 20 nt, Artificial Sequence
  Description of Artificial Sequence: Synthetic oligonucleotide
aaagacacugggcagauggu

SEQ ID NO: 2831 - RNA, 20 nt, Artificial Sequence
  Description of Artificial Sequence: Synthetic oligonucleotide
uuccagagcuggggaaagaa

SEQ ID NO: 2832 - RNA, 20 nt, Artificial Sequence
  Description of Artificial Sequence: Synthetic oligonucleotide
acucacccagcauccccagc

SEQ ID NO: 2833 - RNA, 20 nt, Artificial Sequence
  Description of Artificial Sequence: Synthetic oligonucleotide
agcgacugcagaaagaagag

SEQ ID NO: 2834 - RNA, 20 nt, Artificial Sequence
  Description of Artificial Sequence: Synthetic oligonucleotide
cauaccagcugagccguccg

SEQ ID NO: 2835 - RNA, 20 nt, Artificial Sequence
  Description of Artificial Sequence: Synthetic oligonucleotide
aaggccaugacgcgcucccc

SEQ ID NO: 2836 - RNA, 20 nt, Artificial Sequence
  Description of Artificial Sequence: Synthetic oligonucleotide
ucacggagcagcaaggccag

SEQ ID NO: 2837 - RNA, 20 nt, Artificial Sequence
  Description of Artificial Sequence: Synthetic oligonucleotide
cgcggaccuggcaggaagac

SEQ ID NO: 2838 - RNA, 20 nt, Artificial Sequence
  Description of Artificial Sequence: Synthetic oligonucleotide
ucaccugcgccccccgccgc

SEQ ID NO: 2839 - RNA, 20 nt, Artificial Sequence
  Description of Artificial Sequence: Synthetic oligonucleotide
cuuacugugguugcaguaaa

SEQ ID NO: 2840 - RNA, 20 nt, Artificial Sequence
  Description of Artificial Sequence: Synthetic oligonucleotide
acuuacugugguugcaguaa

SEQ ID NO: 2841 - RNA, 20 nt, Artificial Sequence
  Description of Artificial Sequence: Synthetic oligonucleotide
uuggccauagggcuccaggc

SEQ ID NO: 2842 - RNA, 20 nt, Artificial Sequence
  Description of Artificial Sequence: Synthetic oligonucleotide
guuggccauagggcuccagg

SEQ ID NO: 2843 - RNA, 20 nt, Artificial Sequence
  Description of Artificial Sequence: Synthetic oligonucleotide
gcgccagcaguggagcgguc

SEQ ID NO: 2844 - RNA, 20 nt, Artificial Sequence
  Description of Artificial Sequence: Synthetic oligonucleotide
aauuaccuuguugcaaggua

SEQ ID NO: 2845 - RNA, 20 nt, Artificial Sequence
  Description of Artificial Sequence: Synthetic oligonucleotide
cuaucagccacuaaugaagu

SEQ ID NO: 2846 - RNA, 20 nt, Artificial Sequence
  Description of Artificial Sequence: Synthetic oligonucleotide
cugcuccaaagaagaaucua

SEQ ID NO: 2847 - RNA, 20 nt, Artificial Sequence
  Description of Artificial Sequence: Synthetic oligonucleotide
acuaucaaucuugcccagac

SEQ ID NO: 2848 - RNA, 20 nt, Artificial Sequence
  Description of Artificial Sequence: Synthetic oligonucleotide
uuuuccagaauacugaaaca

SEQ ID NO: 2849 - RNA, 20 nt, Artificial Sequence
  Description of Artificial Sequence: Synthetic oligonucleotide
guuuuccagaauacugaaac

SEQ ID NO: 2850 - RNA, 20 nt, Artificial Sequence
  Description of Artificial Sequence: Synthetic oligonucleotide
uuaccuguagauauucuugc

SEQ ID NO: 2851 - RNA, 20 nt, Artificial Sequence
  Description of Artificial Sequence: Synthetic oligonucleotide
cucaccccaagugacucgag

SEQ ID NO: 2852 - RNA, 20 nt, Artificial Sequence
  Description of Artificial Sequence: Synthetic oligonucleotide
gugcauccagcgcuucgcac

SEQ ID NO: 2853 - RNA, 20 nt, Artificial Sequence
  Description of Artificial Sequence: Synthetic oligonucleotide
gagcugcagcugaaucacac

SEQ ID NO: 2854 - RNA, 20 nt, Artificial Sequence
  Description of Artificial Sequence: Synthetic oligonucleotide
cuggcaggggggcccagcac

SEQ ID NO: 2855 - RNA, 20 nt, Artificial Sequence
  Description of Artificial Sequence: Synthetic oligonucleotide
cucccagcgccugacgcccc

SEQ ID NO: 2856 - RNA, 20 nt, Artificial Sequence
  Description of Artificial Sequence: Synthetic oligonucleotide
cccccugccaguauagccug

SEQ ID NO: 2857 - RNA, 20 nt, Artificial Sequence
  Description of Artificial Sequence: Synthetic oligonucleotide
ccccccugccaguauagccu

SEQ ID NO: 2858 - RNA, 20 nt, Artificial Sequence
  Description of Artificial Sequence: Synthetic oligonucleotide
ugagcccaucccgccagucc

SEQ ID NO: 2859 - RNA, 20 nt, Artificial Sequence
  Description of Artificial Sequence: Synthetic oligonucleotide
ucaccagccccagcaggcag

SEQ ID NO: 2860 - RNA, 20 nt, Artificial Sequence
  Description of Artificial Sequence: Synthetic oligonucleotide
aaguacuggggacacagagc

SEQ ID NO: 2861 - RNA, 20 nt, Artificial Sequence
  Description of Artificial Sequence: Synthetic oligonucleotide
acuucaccugggcaaggcag

SEQ ID NO: 2862 - RNA, 20 nt, Artificial Sequence
  Description of Artificial Sequence: Synthetic oligonucleotide
cacuucaccugggcaaggca

SEQ ID NO: 2863 - RNA, 20 nt, Artificial Sequence
  Description of Artificial Sequence: Synthetic oligonucleotide
ccgcacaccuccugguacac

SEQ ID NO: 2864 - RNA, 20 nt, Artificial Sequence
  Description of Artificial Sequence: Synthetic oligonucleotide
agcccugcaagggcagaaug

SEQ ID NO: 2865 - RNA, 20 nt, Artificial Sequence
  Description of Artificial Sequence: Synthetic oligonucleotide
ccaggagcuguggggagagg

SEQ ID NO: 2866 - RNA, 20 nt, Artificial Sequence
  Description of Artificial Sequence: Synthetic oligonucleotide
guucuuaccagagagcagga

SEQ ID NO: 2867 - RNA, 20 nt, Artificial Sequence
  Description of Artificial Sequence: Synthetic oligonucleotide
gcaccuaaaaaagaagguua

SEQ ID NO: 2868 - RNA, 20 nt, Artificial Sequence
  Description of Artificial Sequence: Synthetic oligonucleotide
uuggcaggaccaggaaaacu

SEQ ID NO: 2869 - RNA, 20 nt, Artificial Sequence
  Description of Artificial Sequence: Synthetic oligonucleotide
caaucuucagaucaaggaca

SEQ ID NO: 2870 - RNA, 20 nt, Artificial Sequence
  Description of Artificial Sequence: Synthetic oligonucleotide
guaauccaaggaaugugguc

SEQ ID NO: 2871 - RNA, 20 nt, Artificial Sequence
  Description of Artificial Sequence: Synthetic oligonucleotide
agagugaacagaccaagaaa

SEQ ID NO: 2872 - RNA, 20 nt, Artificial Sequence
  Description of Artificial Sequence: Synthetic oligonucleotide
ggacauccagucugguggug

SEQ ID NO: 2873 - RNA, 20 nt, Artificial Sequence
  Description of Artificial Sequence: Synthetic oligonucleotide
aaugcauccuggaauggaaa

SEQ ID NO: 2874 - RNA, 20 nt, Artificial Sequence
  Description of Artificial Sequence: Synthetic oligonucleotide
gcacucaccugugaauagaa

SEQ ID NO: 2875 - RNA, 20 nt, Artificial Sequence
  Description of Artificial Sequence: Synthetic oligonucleotide
uaaaacagcugagacuuaaa

SEQ ID NO: 2876 - RNA, 20 nt, Artificial Sequence
  Description of Artificial Sequence: Synthetic oligonucleotide
gcuuccuacaagaaaagguc

SEQ ID NO: 2877 - RNA, 20 nt, Artificial Sequence
  Description of Artificial Sequence: Synthetic oligonucleotide
uuacccagaccuuuucuugu

SEQ ID NO: 2878 - RNA, 20 nt, Artificial Sequence
  Description of Artificial Sequence: Synthetic oligonucleotide
cagcauuuccacaggacaga

SEQ ID NO: 2879 - RNA, 20 nt, Artificial Sequence
  Description of Artificial Sequence: Synthetic oligonucleotide
ccagcauuuccacaggacag

SEQ ID NO: 2880 - RNA, 20 nt, Artificial Sequence
  Description of Artificial Sequence: Synthetic oligonucleotide
acuuaccaaauacaaaaacc

SEQ ID NO: 2881 - RNA, 20 nt, Artificial Sequence
  Description of Artificial Sequence: Synthetic oligonucleotide
gauucugaucagaaaggcau

SEQ ID NO: 2882 - RNA, 20 nt, Artificial Sequence
  Description of Artificial Sequence: Synthetic oligonucleotide
ugaauucugaggaauacaga

SEQ ID NO: 2883 - RNA, 20 nt, Artificial Sequence
  Description of Artificial Sequence: Synthetic oligonucleotide
augacauacgugauuucucc

SEQ ID NO: 2884 - RNA, 20 nt, Artificial Sequence
  Description of Artificial Sequence: Synthetic oligonucleotide
uccugcuccugcacaagaaa

SEQ ID NO: 2885 - RNA, 20 nt, Artificial Sequence
  Description of Artificial Sequence: Synthetic oligonucleotide
ucacccuaggagcaaaacaa

SEQ ID NO: 2886 - RNA, 20 nt, Artificial Sequence
  Description of Artificial Sequence: Synthetic oligonucleotide
cgcagcaucuuccugugagg

SEQ ID NO: 2887 - RNA, 20 nt, Artificial Sequence
  Description of Artificial Sequence: Synthetic oligonucleotide
gcuccuggggguagggggag

SEQ ID NO: 2888 - RNA, 20 nt, Artificial Sequence
  Description of Artificial Sequence: Synthetic oligonucleotide
ggugcucaccggccaccugc

SEQ ID NO: 2889 - RNA, 20 nt, Artificial Sequence
  Description of Artificial Sequence: Synthetic oligonucleotide
agggagcuggaggugacaga

SEQ ID NO: 2890 - RNA, 20 nt, Artificial Sequence
  Description of Artificial Sequence: Synthetic oligonucleotide
uagggagcuggaggugacag

SEQ ID NO: 2891 - RNA, 20 nt, Artificial Sequence
  Description of Artificial Sequence: Synthetic oligonucleotide
gcaaccuguggggcuucucu

SEQ ID NO: 2892 - RNA, 20 nt, Artificial Sequence
  Description of Artificial Sequence: Synthetic oligonucleotide
agcaaccuguggggcuucuc

SEQ ID NO: 2893 - RNA, 20 nt, Artificial Sequence
  Description of Artificial Sequence: Synthetic oligonucleotide
cuccugggggcggggucaga

SEQ ID NO: 2894 - RNA, 20 nt, Artificial Sequence
  Description of Artificial Sequence: Synthetic oligonucleotide
gcuccugggggcggggucag

SEQ ID NO: 2895 - RNA, 20 nt, Artificial Sequence
  Description of Artificial Sequence: Synthetic oligonucleotide
ggugcucaccggccaccugc

SEQ ID NO: 2896 - RNA, 20 nt, Artificial Sequence
  Description of Artificial Sequence: Synthetic oligonucleotide
agggagcuggaggugacaga

SEQ ID NO: 2897 - RNA, 20 nt, Artificial Sequence
  Description of Artificial Sequence: Synthetic oligonucleotide
uagggagcuggaggugacag

SEQ ID NO: 2898 - RNA, 20 nt, Artificial Sequence
  Description of Artificial Sequence: Synthetic oligonucleotide
gcagggcuguaaaaaaagga

SEQ ID NO: 2899 - RNA, 20 nt, Artificial Sequence
  Description of Artificial Sequence: Synthetic oligonucleotide
caucaucuucauuucaugau

SEQ ID NO: 2900 - RNA, 20 nt, Artificial Sequence
  Description of Artificial Sequence: Synthetic oligonucleotide
ccaucaucuucauuucauga

SEQ ID NO: 2901 - RNA, 20 nt, Artificial Sequence
  Description of Artificial Sequence: Synthetic oligonucleotide
guccauugucacagccucug

SEQ ID NO: 2902 - RNA, 20 nt, Artificial Sequence
  Description of Artificial Sequence: Synthetic oligonucleotide
cacucacccaucuuuccucu

SEQ ID NO: 2903 - RNA, 20 nt, Artificial Sequence
  Description of Artificial Sequence: Synthetic oligonucleotide
acuuacucugauguaggaag

SEQ ID NO: 2904 - RNA, 20 nt, Artificial Sequence
  Description of Artificial Sequence: Synthetic oligonucleotide
cuuacucugauguaggaagu

SEQ ID NO: 2905 - RNA, 20 nt, Artificial Sequence
  Description of Artificial Sequence: Synthetic oligonucleotide
uuggaauaccugauagucug

SEQ ID NO: 2906 - RNA, 20 nt, Artificial Sequence
  Description of Artificial Sequence: Synthetic oligonucleotide
ggaacgcuggaaaggagaug

SEQ ID NO: 2907 - RNA, 20 nt, Artificial Sequence
  Description of Artificial Sequence: Synthetic oligonucleotide
gaacgcuggaaaggagauga

SEQ ID NO: 2908 - RNA, 20 nt, Artificial Sequence
  Description of Artificial Sequence: Synthetic oligonucleotide
acguuugacaucuuucuccc

SEQ ID NO: 2909 - RNA, 20 nt, Artificial Sequence
  Description of Artificial Sequence: Synthetic oligonucleotide
caaacgugcgagugucuaac

SEQ ID NO: 2910 - RNA, 20 nt, Artificial Sequence
  Description of Artificial Sequence: Synthetic oligonucleotide
cgaguggcaagagguggaga

SEQ ID NO: 2911 - RNA, 20 nt, Artificial Sequence
  Description of Artificial Sequence: Synthetic oligonucleotide
gaguggcaagagguggagaa

SEQ ID NO: 2912 - RNA, 20 nt, Artificial Sequence
  Description of Artificial Sequence: Synthetic oligonucleotide
aggagagccaggaugucagc

SEQ ID NO: 2913 - RNA, 20 nt, Artificial Sequence
  Description of Artificial Sequence: Synthetic oligonucleotide
ggacagccagacgggguuag

SEQ ID NO: 2914 - RNA, 20 nt, Artificial Sequence
  Description of Artificial Sequence: Synthetic oligonucleotide
cggagcaaugcgcaggaaua

SEQ ID NO: 2915 - RNA, 20 nt, Artificial Sequence
  Description of Artificial Sequence: Synthetic oligonucleotide
aggaagcgaccugcaaccga

SEQ ID NO: 2916 - DNA, 20 bp, Artificial Sequence
  Description of Artificial Sequence: Synthetic oligonucleotide
gagcagacgcccaagaagcc

SEQ ID NO: 2917 - RNA, 20 nt, Artificial Sequence
  Description of Artificial Sequence: Synthetic oligonucleotide
gcugcagagccugcugcucu

SEQ ID NO: 2918 - RNA, 20 nt, Artificial Sequence
  Description of Artificial Sequence: Synthetic oligonucleotide
gcucccagggcugcgugcug

SEQ ID NO: 2919 - RNA, 20 nt, Artificial Sequence
  Description of Artificial Sequence: Synthetic oligonucleotide
ugcucccagggcugcgugcu

SEQ ID NO: 2920 - RNA, 20 nt, Artificial Sequence
  Description of Artificial Sequence: Synthetic oligonucleotide
augcucccagggcugcgugc

SEQ ID NO: 2921 - RNA, 20 nt, Artificial Sequence
  Description of Artificial Sequence: Synthetic oligonucleotide
aggcacucaccgggguugga

SEQ ID NO: 2922 - RNA, 20 nt, Artificial Sequence
  Description of Artificial Sequence: Synthetic oligonucleotide
cuggcucccagcagucaaag

SEQ ID NO: 2923 - RNA, 20 nt, Artificial Sequence
  Description of Artificial Sequence: Synthetic oligonucleotide
ugacaucuucucaggagcuc

SEQ ID NO: 2924 - RNA, 20 nt, Artificial Sequence
  Description of Artificial Sequence: Synthetic oligonucleotide
ucacggcaugaggcugaguu

SEQ ID NO: 2925 - RNA, 20 nt, Artificial Sequence
  Description of Artificial Sequence: Synthetic oligonucleotide
gaaccaacuggggagcagca

SEQ ID NO: 2926 - RNA, 20 nt, Artificial Sequence
  Description of Artificial Sequence: Synthetic oligonucleotide
ggaaccaacuggggagcagc

SEQ ID NO: 2927 - RNA, 20 nt, Artificial Sequence
  Description of Artificial Sequence: Synthetic oligonucleotide
ucaccuccaccagcugcaug

SEQ ID NO: 2928 - RNA, 20 nt, Artificial Sequence
  Description of Artificial Sequence: Synthetic oligonucleotide
guagugcugcaggguguggg

SEQ ID NO: 2929 - RNA, 20 nt, Artificial Sequence
  Description of Artificial Sequence: Synthetic oligonucleotide
uguagugcugcagggugugg

SEQ ID NO: 2930 - RNA, 20 nt, Artificial Sequence
  Description of Artificial Sequence: Synthetic oligonucleotide
cacgucugggggcagagagg

SEQ ID NO: 2931 - RNA, 20 nt, Artificial Sequence
  Description of Artificial Sequence: Synthetic oligonucleotide
caucacgucugggggcagag

SEQ ID NO: 2932 - RNA, 20 nt, Artificial Sequence
  Description of Artificial Sequence: Synthetic oligonucleotide
aggcuccccugggggcagga

SEQ ID NO: 2933 - RNA, 20 nt, Artificial Sequence
  Description of Artificial Sequence: Synthetic oligonucleotide
ucacucacagcgagaacuug

SEQ ID NO: 2934 - RNA, 20 nt, Artificial Sequence
  Description of Artificial Sequence: Synthetic oligonucleotide
cagccccaccuucucucuca

SEQ ID NO: 2935 - RNA, 20 nt, Artificial Sequence
  Description of Artificial Sequence: Synthetic oligonucleotide
gagaauuucugccaugugga

SEQ ID NO: 2936 - RNA, 20 nt, Artificial Sequence
  Description of Artificial Sequence: Synthetic oligonucleotide
auacucacaauucuuggaua

SEQ ID NO: 2937 - RNA, 20 nt, Artificial Sequence
  Description of Artificial Sequence: Synthetic oligonucleotide
caggggcuguggccaggggg

SEQ ID NO: 2938 - RNA, 20 nt, Artificial Sequence
  Description of Artificial Sequence: Synthetic oligonucleotide
acucaccuuugcagaagaca

SEQ ID NO: 2939 - RNA, 20 nt, Artificial Sequence
  Description of Artificial Sequence: Synthetic oligonucleotide
cacucaccuuugcagaagac

SEQ ID NO: 2940 - RNA, 20 nt, Artificial Sequence
  Description of Artificial Sequence: Synthetic oligonucleotide
agggccagguccugguagcc

SEQ ID NO: 2941 - RNA, 20 nt, Artificial Sequence
  Description of Artificial Sequence: Synthetic oligonucleotide
ggcccagccugcugugguac

SEQ ID NO: 2942 - RNA, 20 nt, Artificial Sequence
  Description of Artificial Sequence: Synthetic oligonucleotide
gcuucggcaggcugacagcc

SEQ ID NO: 2943 - RNA, 20 nt, Artificial Sequence
  Description of Artificial Sequence: Synthetic oligonucleotide
uauccaaggacugagggcca

SEQ ID NO: 2944 - RNA, 20 nt, Artificial Sequence
  Description of Artificial Sequence: Synthetic oligonucleotide
ggaacccagauuuauguaau

SEQ ID NO: 2945 - RNA, 20 nt, Artificial Sequence
  Description of Artificial Sequence: Synthetic oligonucleotide
gcucaccaauuacauaaauc

SEQ ID NO: 2946 - RNA, 20 nt, Artificial Sequence
  Description of Artificial Sequence: Synthetic oligonucleotide
cucaccaauuacauaaaucu

SEQ ID NO: 2947 - RNA, 20 nt, Artificial Sequence
  Description of Artificial Sequence: Synthetic oligonucleotide
cucagcugaaccuggcuacc

SEQ ID NO: 2948 - RNA, 20 nt, Artificial Sequence
  Description of Artificial Sequence: Synthetic oligonucleotide
uuaacaucuacuacauacaa

SEQ ID NO: 2949 - RNA, 20 nt, Artificial Sequence
  Description of Artificial Sequence: Synthetic oligonucleotide
cuuaccuggauauagucaac

SEQ ID NO: 2950 - RNA, 20 nt, Artificial Sequence
  Description of Artificial Sequence: Synthetic oligonucleotide
auccagcguaagaauaacag

SEQ ID NO: 2951 - RNA, 20 nt, Artificial Sequence
  Description of Artificial Sequence: Synthetic oligonucleotide
guauguacaacaaaauaaug

SEQ ID NO: 2952 - RNA, 20 nt, Artificial Sequence
  Description of Artificial Sequence: Synthetic oligonucleotide
cgagaucaaguuguacguua

SEQ ID NO: 2953 - RNA, 20 nt, Artificial Sequence
  Description of Artificial Sequence: Synthetic oligonucleotide
ugccagauguuaaugauuuu

SEQ ID NO: 2954 - RNA, 20 nt, Artificial Sequence
  Description of Artificial Sequence: Synthetic oligonucleotide
augucaguucacgucaaaac

SEQ ID NO: 2955 - RNA, 20 nt, Artificial Sequence
  Description of Artificial Sequence: Synthetic oligonucleotide
gcccuacagucccucgccug

SEQ ID NO: 2956 - RNA, 20 nt, Artificial Sequence
  Description of Artificial Sequence: Synthetic oligonucleotide
guccagaauuuccagaagua

SEQ ID NO: 2957 - RNA, 20 nt, Artificial Sequence
  Description of Artificial Sequence: Synthetic oligonucleotide
ucccuggaggggugggggag

SEQ ID NO: 2958 - RNA, 20 nt, Artificial Sequence
  Description of Artificial Sequence: Synthetic oligonucleotide
ucacuucaacaggacuccua

SEQ ID NO: 2959 - RNA, 20 nt, Artificial Sequence
  Description of Artificial Sequence: Synthetic oligonucleotide
ccuuacacucaaaggcaaag

SEQ ID NO: 2960 - RNA, 20 nt, Artificial Sequence
  Description of Artificial Sequence: Synthetic oligonucleotide
auggcugcagggagaggaag

SEQ ID NO: 2961 - RNA, 20 nt, Artificial Sequence
  Description of Artificial Sequence: Synthetic oligonucleotide
ggagcgccaggggaugcugg

SEQ ID NO: 2962 - RNA, 20 nt, Artificial Sequence
  Description of Artificial Sequence: Synthetic oligonucleotide
ucacgucccaugcagccaca

SEQ ID NO: 2963 - RNA, 20 nt, Artificial Sequence
  Description of Artificial Sequence: Synthetic oligonucleotide
uggacgucugguggggagua

SEQ ID NO: 2964 - RNA, 20 nt, Artificial Sequence
  Description of Artificial Sequence: Synthetic oligonucleotide
acucacauugaugaggaaga

SEQ ID NO: 2965 - RNA, 20 nt, Artificial Sequence
  Description of Artificial Sequence: Synthetic oligonucleotide
cagcaucugagaaaggcaga

SEQ ID NO: 2966 - RNA, 20 nt, Artificial Sequence
  Description of Artificial Sequence: Synthetic oligonucleotide
aauccaacaccucagcgaug

SEQ ID NO: 2967 - RNA, 20 nt, Artificial Sequence
  Description of Artificial Sequence: Synthetic oligonucleotide
auccaacaccucagcgaugu

SEQ ID NO: 2968 - RNA, 20 nt, Artificial Sequence
  Description of Artificial Sequence: Synthetic oligonucleotide
guggccauuccuuagucuug

SEQ ID NO: 2969 - RNA, 20 nt, Artificial Sequence
  Description of Artificial Sequence: Synthetic oligonucleotide
cuuaccgauguucccuucga

SEQ ID NO: 2970 - RNA, 20 nt, Artificial Sequence
  Description of Artificial Sequence: Synthetic oligonucleotide
uuaaacaauugugugaagau

SEQ ID NO: 2971 - RNA, 20 nt, Artificial Sequence
  Description of Artificial Sequence: Synthetic oligonucleotide
uaaacaauugugugaagauu

SEQ ID NO: 2972 - RNA, 20 nt, Artificial Sequence
  Description of Artificial Sequence: Synthetic oligonucleotide
caccaucuggcaacagguuc

SEQ ID NO: 2973 - RNA, 20 nt, Artificial Sequence
  Description of Artificial Sequence: Synthetic oligonucleotide
aaguacucaagaugaauuug

SEQ ID NO: 2974 - RNA, 20 nt, Artificial Sequence
  Description of Artificial Sequence: Synthetic oligonucleotide
caaugucucagaaaaauggu

SEQ ID NO: 2975 - RNA, 20 nt, Artificial Sequence
  Description of Artificial Sequence: Synthetic oligonucleotide
gcucagcuugccucucugaa

SEQ ID NO: 2976 - RNA, 20 nt, Artificial Sequence
  Description of Artificial Sequence: Synthetic oligonucleotide
uuuaucaagacuggcaugac

SEQ ID NO: 2977 - RNA, 20 nt, Artificial Sequence
  Description of Artificial Sequence: Synthetic oligonucleotide
auuuggccaaagccuugaau

SEQ ID NO: 2978 - RNA, 20 nt, Artificial Sequence
  Description of Artificial Sequence: Synthetic oligonucleotide
uuaucuucaagccacuccag

SEQ ID NO: 2979 - RNA, 20 nt, Artificial Sequence
  Description of Artificial Sequence: Synthetic oligonucleotide
cuuacuucaguguccuaugc

SEQ ID NO: 2980 - RNA, 20 nt, Artificial Sequence
  Description of Artificial Sequence: Synthetic oligonucleotide
accccauuuuguuccgccuc

SEQ ID NO: 2981 - RNA, 20 nt, Artificial Sequence
  Description of Artificial Sequence: Synthetic oligonucleotide
ucacauucuaacuugucuuc

SEQ ID NO: 2982 - RNA, 20 nt, Artificial Sequence
  Description of Artificial Sequence: Synthetic oligonucleotide
ugacugugggguguuuuagg

SEQ ID NO: 2983 - RNA, 20 nt, Artificial Sequence
  Description of Artificial Sequence: Synthetic oligonucleotide
gugacugugggguguuuuag

SEQ ID NO: 2984 - RNA, 20 nt, Artificial Sequence
  Description of Artificial Sequence: Synthetic oligonucleotide
ggugacugugggguguuuua

SEQ ID NO: 2985 - RNA, 20 nt, Artificial Sequence
  Description of Artificial Sequence: Synthetic oligonucleotide
aggugacugugggguguuuu

SEQ ID NO: 2986 - RNA, 20 nt, Artificial Sequence
  Description of Artificial Sequence: Synthetic oligonucleotide
aaucugagcacagaguggaa

SEQ ID NO: 2987 - RNA, 20 nt, Artificial Sequence
  Description of Artificial Sequence: Synthetic oligonucleotide
ugaagaaucugagcacagag

SEQ ID NO: 2988 - RNA, 20 nt, Artificial Sequence
  Description of Artificial Sequence: Synthetic oligonucleotide
ugauuggaccuuggggagaa

SEQ ID NO: 2989 - RNA, 20 nt, Artificial Sequence
  Description of Artificial Sequence: Synthetic oligonucleotide
guggaucugaaagacgaggu

SEQ ID NO: 2990 - RNA, 20 nt, Artificial Sequence
  Description of Artificial Sequence: Synthetic oligonucleotide
cguggaucugaaagacgagg

SEQ ID NO: 2991 - RNA, 20 nt, Artificial Sequence
  Description of Artificial Sequence: Synthetic oligonucleotide
cuguacccgcagagccucag

SEQ ID NO: 2992 - RNA, 20 nt, Artificial Sequence
  Description of Artificial Sequence: Synthetic oligonucleotide
aaucggagccugagacaaag

SEQ ID NO: 2993 - RNA, 20 nt, Artificial Sequence
  Description of Artificial Sequence: Synthetic oligonucleotide
acuuaccuccuccccaucuu

SEQ ID NO: 2994 - RNA, 20 nt, Artificial Sequence
  Description of Artificial Sequence: Synthetic oligonucleotide
aaccuaggaguggagaagac

SEQ ID NO: 2995 - RNA, 20 nt, Artificial Sequence
  Description of Artificial Sequence: Synthetic oligonucleotide
agaggcauccuggagaguuc

SEQ ID NO: 2996 - RNA, 20 nt, Artificial Sequence
  Description of Artificial Sequence: Synthetic oligonucleotide
cccacagaucugagaggagg

SEQ ID NO: 2997 - RNA, 20 nt, Artificial Sequence
  Description of Artificial Sequence: Synthetic oligonucleotide
uuaggucuggggacgaagua

SEQ ID NO: 2998 - RNA, 20 nt, Artificial Sequence
  Description of Artificial Sequence: Synthetic oligonucleotide
cuuaggucuggggacgaagu

SEQ ID NO: 2999 - RNA, 20 nt, Artificial Sequence
  Description of Artificial Sequence: Synthetic oligonucleotide
uguggugcuauaggaggcca

SEQ ID NO: 3000 - RNA, 20 nt, Artificial Sequence
  Description of Artificial Sequence: Synthetic oligonucleotide
gacccuggaagaguuggggc

SEQ ID NO: 3001 - RNA, 20 nt, Artificial Sequence
  Description of Artificial Sequence: Synthetic oligonucleotide
cugacuccuagccacgggau

SEQ ID NO: 3002 - RNA, 20 nt, Artificial Sequence
  Description of Artificial Sequence: Synthetic oligonucleotide
cugcugcaggacaggaagag

SEQ ID NO: 3003 - RNA, 20 nt, Artificial Sequence
  Description of Artificial Sequence: Synthetic oligonucleotide
acuuaccucgcggacauucc

SEQ ID NO: 3004 - RNA, 20 nt, Artificial Sequence
  Description of Artificial Sequence: Synthetic oligonucleotide
aagguuggcugggggagaag

SEQ ID NO: 3005 - RNA, 20 nt, Artificial Sequence
  Description of Artificial Sequence: Synthetic oligonucleotide
aaagguuggcugggggagaa

SEQ ID NO: 3006 - RNA, 20 nt, Artificial Sequence
  Description of Artificial Sequence: Synthetic oligonucleotide
aucccugaggguagacagga

SEQ ID NO: 3007 - RNA, 20 nt, Artificial Sequence
  Description of Artificial Sequence: Synthetic oligonucleotide
uggaaucccugaggguagac

SEQ ID NO: 3008 - RNA, 20 nt, Artificial Sequence
  Description of Artificial Sequence: Synthetic oligonucleotide
gugguacugaggagagcgag

SEQ ID NO: 3009 - RNA, 20 nt, Artificial Sequence
  Description of Artificial Sequence: Synthetic oligonucleotide
ugugguacugaggagagcga

SEQ ID NO: 3010 - RNA, 20 nt, Artificial Sequence
  Description of Artificial Sequence: Synthetic oligonucleotide
cugugguacugaggagagcg

SEQ ID NO: 3011 - RNA, 20 nt, Artificial Sequence
  Description of Artificial Sequence: Synthetic oligonucleotide
aguacucaccuggggccucc

SEQ ID NO: 3012 - RNA, 20 nt, Artificial Sequence
  Description of Artificial Sequence: Synthetic oligonucleotide
guauucugcaagggaagcag

SEQ ID NO: 3013 - RNA, 20 nt, Artificial Sequence
  Description of Artificial Sequence: Synthetic oligonucleotide
aguauucugcaagggaagca

SEQ ID NO: 3014 - RNA, 20 nt, Artificial Sequence
  Description of Artificial Sequence: Synthetic oligonucleotide
gaguauucugcaagggaagc

SEQ ID NO: 3015 - RNA, 20 nt, Artificial Sequence
  Description of Artificial Sequence: Synthetic oligonucleotide
cuccugggagacaaggugag

SEQ ID NO: 3016 - RNA, 20 nt, Artificial Sequence
  Description of Artificial Sequence: Synthetic oligonucleotide
uuugcacccuggaugggaug

SEQ ID NO: 3017 - RNA, 20 nt, Artificial Sequence
  Description of Artificial Sequence: Synthetic oligonucleotide
agccugggcucaugggaaga

SEQ ID NO: 3018 - RNA, 20 nt, Artificial Sequence
  Description of Artificial Sequence: Synthetic oligonucleotide
gcuuaccccaccccaguuga

SEQ ID NO: 3019 - RNA, 20 nt, Artificial Sequence
  Description of Artificial Sequence: Synthetic oligonucleotide
ugcuuaccccaccccaguug

SEQ ID NO: 3020 - RNA, 20 nt, Artificial Sequence
  Description of Artificial Sequence: Synthetic oligonucleotide
uagcccugggggagcaggca

SEQ ID NO: 3021 - RNA, 20 nt, Artificial Sequence
  Description of Artificial Sequence: Synthetic oligonucleotide
guagcccugggggagcaggc

SEQ ID NO: 3022 - RNA, 20 nt, Artificial Sequence
  Description of Artificial Sequence: Synthetic oligonucleotide
ggcaacuggaaaaaggucaa

SEQ ID NO: 3023 - RNA, 20 nt, Artificial Sequence
  Description of Artificial Sequence: Synthetic oligonucleotide
gggcaacuggaaaaagguca

SEQ ID NO: 3024 - RNA, 20 nt, Artificial Sequence
  Description of Artificial Sequence: Synthetic oligonucleotide
gcugccaaccucgagacucg

SEQ ID NO: 3025 - RNA, 20 nt, Artificial Sequence
  Description of Artificial Sequence: Synthetic oligonucleotide
agcugucugugggagacaga

SEQ ID NO: 3026 - RNA, 20 nt, Artificial Sequence
  Description of Artificial Sequence: Synthetic oligonucleotide
aagcugucugugggagacag

SEQ ID NO: 3027 - RNA, 20 nt, Artificial Sequence
  Description of Artificial Sequence: Synthetic oligonucleotide
cuccucaccuggggauguuc

SEQ ID NO: 3028 - RNA, 20 nt, Artificial Sequence
  Description of Artificial Sequence: Synthetic oligonucleotide
cccacucaccaacgacguca

SEQ ID NO: 3029 - RNA, 20 nt, Artificial Sequence
  Description of Artificial Sequence: Synthetic oligonucleotide
guacucgcugugcagggggg

SEQ ID NO: 3030 - RNA, 20 nt, Artificial Sequence
  Description of Artificial Sequence: Synthetic oligonucleotide
gacguacucgcugugcaggg

SEQ ID NO: 3031 - RNA, 20 nt, Artificial Sequence
  Description of Artificial Sequence: Synthetic oligonucleotide
ggacguacucgcugugcagg

SEQ ID NO: 3032 - RNA, 20 nt, Artificial Sequence
  Description of Artificial Sequence: Synthetic oligonucleotide
gggacguacucgcugugcag

SEQ ID NO: 3033 - RNA, 20 nt, Artificial Sequence
  Description of Artificial Sequence: Synthetic oligonucleotide
ugcuggcugucgggcagggc

SEQ ID NO: 3034 - RNA, 20 nt, Artificial Sequence
  Description of Artificial Sequence: Synthetic oligonucleotide
gcuccuguugagagaagcaa

SEQ ID NO: 3035 - RNA, 20 nt, Artificial Sequence
  Description of Artificial Sequence: Synthetic oligonucleotide
agugguggcugugggagaga

SEQ ID NO: 3036 - RNA, 20 nt, Artificial Sequence
  Description of Artificial Sequence: Synthetic oligonucleotide
gcuccuguggggggagguca

SEQ ID NO: 3037 - RNA, 20 nt, Artificial Sequence
  Description of Artificial Sequence: Synthetic oligonucleotide
ugcuccuguggggggagguc

SEQ ID NO: 3038 - RNA, 20 nt, Artificial Sequence
  Description of Artificial Sequence: Synthetic oligonucleotide
ucaccggggcgugggugagc

SEQ ID NO: 3039 - RNA, 20 nt, Artificial Sequence
  Description of Artificial Sequence: Synthetic oligonucleotide
ggagcugagggcaggaggca

SEQ ID NO: 3040 - RNA, 20 nt, Artificial Sequence
  Description of Artificial Sequence: Synthetic oligonucleotide
ccggcucaccgugguccagc

SEQ ID NO: 3041 - RNA, 20 nt, Artificial Sequence
  Description of Artificial Sequence: Synthetic oligonucleotide
gggggcuggagaaggggagg

SEQ ID NO: 3042 - RNA, 20 nt, Artificial Sequence
  Description of Artificial Sequence: Synthetic oligonucleotide
ugggggggcuggagaagggg

SEQ ID NO: 3043 - RNA, 20 nt, Artificial Sequence
  Description of Artificial Sequence: Synthetic oligonucleotide
cccgcugggggagcaggggc

SEQ ID NO: 3044 - RNA, 20 nt, Artificial Sequence
  Description of Artificial Sequence: Synthetic oligonucleotide
ucuccccgcugggggagcag

SEQ ID NO: 3045 - RNA, 20 nt, Artificial Sequence
  Description of Artificial Sequence: Synthetic oligonucleotide
acacuggaggcgggcgggga

SEQ ID NO: 3046 - RNA, 20 nt, Artificial Sequence
  Description of Artificial Sequence: Synthetic oligonucleotide
cacacuggaggcgggcgggg

SEQ ID NO: 3047 - RNA, 20 nt, Artificial Sequence
  Description of Artificial Sequence: Synthetic oligonucleotide
caucacacuggaggcgggcg

SEQ ID NO: 3048 - RNA, 20 nt, Artificial Sequence
  Description of Artificial Sequence: Synthetic oligonucleotide
cuacgcgagcagggcgcucc

SEQ ID NO: 3049 - RNA, 20 nt, Artificial Sequence
  Description of Artificial Sequence: Synthetic oligonucleotide
uggcuguugggcacagagac

SEQ ID NO: 3050 - RNA, 20 nt, Artificial Sequence
  Description of Artificial Sequence: Synthetic oligonucleotide
acugacuucugcugcaggac

SEQ ID NO: 3051 - RNA, 20 nt, Artificial Sequence
  Description of Artificial Sequence: Synthetic oligonucleotide
uccccauggcgacuaggcca

SEQ ID NO: 3052 - RNA, 20 nt, Artificial Sequence
  Description of Artificial Sequence: Synthetic oligonucleotide
uuccccauggcgacuaggcc

SEQ ID NO: 3053 - RNA, 20 nt, Artificial Sequence
  Description of Artificial Sequence: Synthetic oligonucleotide
gaaccugcauuuccggggag

SEQ ID NO: 3054 - RNA, 20 nt, Artificial Sequence
  Description of Artificial Sequence: Synthetic oligonucleotide
guggcgaaccugcauuuccg

SEQ ID NO: 3055 - RNA, 20 nt, Artificial Sequence
  Description of Artificial Sequence: Synthetic oligonucleotide
ucacugggggaggaagaaca

SEQ ID NO: 3056 - RNA, 20 nt, Artificial Sequence
  Description of Artificial Sequence: Synthetic oligonucleotide
acccuguaugggcagaguuc

SEQ ID NO: 3057 - RNA, 20 nt, Artificial Sequence
  Description of Artificial Sequence: Synthetic oligonucleotide
gacccuguaugggcagaguu

SEQ ID NO: 3058 - RNA, 20 nt, Artificial Sequence
  Description of Artificial Sequence: Synthetic oligonucleotide
aaguccuggggggagguccg

SEQ ID NO: 3059 - RNA, 20 nt, Artificial Sequence
  Description of Artificial Sequence: Synthetic oligonucleotide
gaaguccuggggggaggucc

SEQ ID NO: 3060 - RNA, 20 nt, Artificial Sequence
  Description of Artificial Sequence: Synthetic oligonucleotide
ggaaguccuggggggagguc

SEQ ID NO: 3061 - RNA, 20 nt, Artificial Sequence
  Description of Artificial Sequence: Synthetic oligonucleotide
agguuccucugcaaaaggac

SEQ ID NO: 3062 - RNA, 20 nt, Artificial Sequence
  Description of Artificial Sequence: Synthetic oligonucleotide
guuaccuugaugaccggcgg

SEQ ID NO: 3063 - RNA, 20 nt, Artificial Sequence
  Description of Artificial Sequence: Synthetic oligonucleotide
uguguuaccuugaugaccgg

SEQ ID NO: 3064 - RNA, 20 nt, Artificial Sequence
  Description of Artificial Sequence: Synthetic oligonucleotide
caccugugggacgcccagga

SEQ ID NO: 3065 - RNA, 20 nt, Artificial Sequence
  Description of Artificial Sequence: Synthetic oligonucleotide
auuccaccugugggacgccc

SEQ ID NO: 3066 - RNA, 20 nt, Artificial Sequence
  Description of Artificial Sequence: Synthetic oligonucleotide
ccucaccugcgggcagcauc

SEQ ID NO: 3067 - RNA, 20 nt, Artificial Sequence
  Description of Artificial Sequence: Synthetic oligonucleotide
augccaccuguggaaagaau

SEQ ID NO: 3068 - RNA, 20 nt, Artificial Sequence
  Description of Artificial Sequence: Synthetic oligonucleotide
gaugccaccuguggaaagaa

SEQ ID NO: 3069 - RNA, 20 nt, Artificial Sequence
  Description of Artificial Sequence: Synthetic oligonucleotide
uuuaccuuguggccgggcuc

SEQ ID NO: 3070 - RNA, 20 nt, Artificial Sequence
  Description of Artificial Sequence: Synthetic oligonucleotide
uuucugggagaggggcaggu

SEQ ID NO: 3071 - RNA, 20 nt, Artificial Sequence
  Description of Artificial Sequence: Synthetic oligonucleotide
uccuuuucugggagaggggc

SEQ ID NO: 3072 - RNA, 20 nt, Artificial Sequence
  Description of Artificial Sequence: Synthetic oligonucleotide
cucaccuggagggaaagcag

SEQ ID NO: 3073 - RNA, 20 nt, Artificial Sequence
  Description of Artificial Sequence: Synthetic oligonucleotide
uuaccugugcuugcuucucu

SEQ ID NO: 3074 - RNA, 20 nt, Artificial Sequence
  Description of Artificial Sequence: Synthetic oligonucleotide
guuaccugugcuugcuucuc

SEQ ID NO: 3075 - RNA, 20 nt, Artificial Sequence
  Description of Artificial Sequence: Synthetic oligonucleotide
aagaccuaggauucggggaa

SEQ ID NO: 3076 - RNA, 20 nt, Artificial Sequence
  Description of Artificial Sequence: Synthetic oligonucleotide
aaagaccuaggauucgggga

SEQ ID NO: 3077 - RNA, 20 nt, Artificial Sequence
  Description of Artificial Sequence: Synthetic oligonucleotide
acccaccuguagcaguggcc

SEQ ID NO: 3078 - RNA, 20 nt, Artificial Sequence
  Description of Artificial Sequence: Synthetic oligonucleotide
gacccaccuguagcaguggc

SEQ ID NO: 3079 - RNA, 20 nt, Artificial Sequence
  Description of Artificial Sequence: Synthetic oligonucleotide
agccuggauggagagaaacc

SEQ ID NO: 3080 - RNA, 20 nt, Artificial Sequence
  Description of Artificial Sequence: Synthetic oligonucleotide
cagccuggauggagagaaac

SEQ ID NO: 3081 - RNA, 20 nt, Artificial Sequence
  Description of Artificial Sequence: Synthetic oligonucleotide
ccuuaccuuucugcuuucug

SEQ ID NO: 3082 - RNA, 20 nt, Artificial Sequence
  Description of Artificial Sequence: Synthetic oligonucleotide
gccuuaccuuucugcuuucu

SEQ ID NO: 3083 - RNA, 20 nt, Artificial Sequence
  Description of Artificial Sequence: Synthetic oligonucleotide
ggccuuaccuuucugcuuuc

SEQ ID NO: 3084 - RNA, 20 nt, Artificial Sequence
  Description of Artificial Sequence: Synthetic oligonucleotide
cacccuggagauggaggugg

SEQ ID NO: 3085 - RNA, 20 nt, Artificial Sequence
  Description of Artificial Sequence: Synthetic oligonucleotide
cuucacccuggagauggagg

SEQ ID NO: 3086 - RNA, 20 nt, Artificial Sequence
  Description of Artificial Sequence: Synthetic oligonucleotide
acaaacccagcagcaccaug

SEQ ID NO: 3087 - RNA, 20 nt, Artificial Sequence
  Description of Artificial Sequence: Synthetic oligonucleotide
gcgccuggggaacgaagagg

SEQ ID NO: 3088 - RNA, 20 nt, Artificial Sequence
  Description of Artificial Sequence: Synthetic oligonucleotide
ggcgccuggggaacgaagag

SEQ ID NO: 3089 - RNA, 20 nt, Artificial Sequence
  Description of Artificial Sequence: Synthetic oligonucleotide
cggcgccuggggaacgaaga

SEQ ID NO: 3090 - RNA, 20 nt, Artificial Sequence
  Description of Artificial Sequence: Synthetic oligonucleotide
acggcgccuggggaacgaag

SEQ ID NO: 3091 - RNA, 20 nt, Artificial Sequence
  Description of Artificial Sequence: Synthetic oligonucleotide
ccguaccugcgguggucagc

SEQ ID NO: 3092 - RNA, 20 nt, Artificial Sequence
  Description of Artificial Sequence: Synthetic oligonucleotide
agacgccugggggccggggg

SEQ ID NO: 3093 - RNA, 20 nt, Artificial Sequence
  Description of Artificial Sequence: Synthetic oligonucleotide
acucacagaacacgcuggcc

SEQ ID NO: 3094 - RNA, 20 nt, Artificial Sequence
  Description of Artificial Sequence: Synthetic oligonucleotide
caccuaccugcccuuccagc

SEQ ID NO: 3095 - RNA, 20 nt, Artificial Sequence
  Description of Artificial Sequence: Synthetic oligonucleotide
aagaccugaugagagaccac

SEQ ID NO: 3096 - RNA, 20 nt, Artificial Sequence
  Description of Artificial Sequence: Synthetic oligonucleotide
gcaggucugcaggggaggga

SEQ ID NO: 3097 - RNA, 20 nt, Artificial Sequence
  Description of Artificial Sequence: Synthetic oligonucleotide
acguccugggggcggcgggc

SEQ ID NO: 3098 - RNA, 20 nt, Artificial Sequence
  Description of Artificial Sequence: Synthetic oligonucleotide
gucauccugaggagagaagc

SEQ ID NO: 3099 - RNA, 20 nt, Artificial Sequence
  Description of Artificial Sequence: Synthetic oligonucleotide
ucacugcacggcuuguucau

SEQ ID NO: 3100 - RNA, 20 nt, Artificial Sequence
  Description of Artificial Sequence: Synthetic oligonucleotide
augcaggcuauggggguggg

SEQ ID NO: 3101 - RNA, 20 nt, Artificial Sequence
  Description of Artificial Sequence: Synthetic oligonucleotide
caugcaggcuaugggggugg

SEQ ID NO: 3102 - RNA, 20 nt, Artificial Sequence
  Description of Artificial Sequence: Synthetic oligonucleotide
gucuuuuucauugacuagaa

SEQ ID NO: 3103 - RNA, 20 nt, Artificial Sequence
  Description of Artificial Sequence: Synthetic oligonucleotide
ugacuuaccuuaacguuuuc

SEQ ID NO: 3104 - RNA, 20 nt, Artificial Sequence
  Description of Artificial Sequence: Synthetic oligonucleotide
ugcaucaaguagaagaaugc

SEQ ID NO: 3105 - RNA, 20 nt, Artificial Sequence
  Description of Artificial Sequence: Synthetic oligonucleotide
cucuuuccaugcaaucaguc

SEQ ID NO: 3106 - RNA, 20 nt, Artificial Sequence
  Description of Artificial Sequence: Synthetic oligonucleotide
guucagaaaguaaaugaaau

SEQ ID NO: 3107 - RNA, 20 nt, Artificial Sequence
  Description of Artificial Sequence: Synthetic oligonucleotide
ucacuuuccauccuguacaa

SEQ ID NO: 3108 - RNA, 20 nt, Artificial Sequence
  Description of Artificial Sequence: Synthetic oligonucleotide
ggccaagaggaaggugccua

SEQ ID NO: 3109 - RNA, 20 nt, Artificial Sequence
  Description of Artificial Sequence: Synthetic oligonucleotide
gcucugcaauuucgccucua

SEQ ID NO: 3110 - RNA, 20 nt, Artificial Sequence
  Description of Artificial Sequence: Synthetic oligonucleotide
acucuggcagaaacuggcca

SEQ ID NO: 3111 - RNA, 20 nt, Artificial Sequence
  Description of Artificial Sequence: Synthetic oligonucleotide
uauacuugccugaauguccu

SEQ ID NO: 3112 - RNA, 20 nt, Artificial Sequence
  Description of Artificial Sequence: Synthetic oligonucleotide
aacuuaccccaaaauccccc

SEQ ID NO: 3113 - RNA, 20 nt, Artificial Sequence
  Description of Artificial Sequence: Synthetic oligonucleotide
cugugcucagccuugggagg

SEQ ID NO: 3114 - RNA, 20 nt, Artificial Sequence
  Description of Artificial Sequence: Synthetic oligonucleotide
uuuuaucuagaagugaagug

SEQ ID NO: 3115 - RNA, 20 nt, Artificial Sequence
  Description of Artificial Sequence: Synthetic oligonucleotide
uuuaucuagaagugaaguga

SEQ ID NO: 3116 - RNA, 20 nt, Artificial Sequence
  Description of Artificial Sequence: Synthetic oligonucleotide
uuaucuagaagugaagugag

SEQ ID NO: 3117 - RNA, 20 nt, Artificial Sequence
  Description of Artificial Sequence: Synthetic oligonucleotide
uaucuagaagugaagugagg

SEQ ID NO: 3118 - RNA, 20 nt, Artificial Sequence
  Description of Artificial Sequence: Synthetic oligonucleotide
aaauuaccuugccaaugaaa

SEQ ID NO: 3119 - RNA, 20 nt, Artificial Sequence
  Description of Artificial Sequence: Synthetic oligonucleotide
cccaccuucuuccccaggcg

SEQ ID NO: 3120 - RNA, 20 nt, Artificial Sequence
  Description of Artificial Sequence: Synthetic oligonucleotide
gagcagaacgaccuggagcc

SEQ ID NO: 3121 - RNA, 20 nt, Artificial Sequence
  Description of Artificial Sequence: Synthetic oligonucleotide
guccugccagaugaaccugg

SEQ ID NO: 3122 - RNA, 20 nt, Artificial Sequence
  Description of Artificial Sequence: Synthetic oligonucleotide
ccugguacaagagguucagc

SEQ ID NO: 3123 - RNA, 20 nt, Artificial Sequence
  Description of Artificial Sequence: Synthetic oligonucleotide
gugaccuccagaacaggagu

SEQ ID NO: 3124 - RNA, 20 nt, Artificial Sequence
  Description of Artificial Sequence: Synthetic oligonucleotide
ugaccuccagaacaggagug

SEQ ID NO: 3125 - RNA, 20 nt, Artificial Sequence
  Description of Artificial Sequence: Synthetic oligonucleotide
guuccaugacaucggggaca

SEQ ID NO: 3126 - RNA, 20 nt, Artificial Sequence
  Description of Artificial Sequence: Synthetic oligonucleotide
ggaguucauagcugggcucc

SEQ ID NO: 3127 - RNA, 20 nt, Artificial Sequence
  Description of Artificial Sequence: Synthetic oligonucleotide
ccuacccaccuccuuucuca

SEQ ID NO: 3128 - RNA, 20 nt, Artificial Sequence
  Description of Artificial Sequence: Synthetic oligonucleotide
guaccucauugaauccagau

SEQ ID NO: 3129 - RNA, 20 nt, Artificial Sequence
  Description of Artificial Sequence: Synthetic oligonucleotide
cuuccaaucuggauucaaug

SEQ ID NO: 3130 - RNA, 20 nt, Artificial Sequence
  Description of Artificial Sequence: Synthetic oligonucleotide
cuccuaagaggaaagauggu

SEQ ID NO: 3131 - RNA, 20 nt, Artificial Sequence
  Description of Artificial Sequence: Synthetic oligonucleotide
ucuccuaagaggaaagaugg

SEQ ID NO: 3132 - RNA, 20 nt, Artificial Sequence
  Description of Artificial Sequence: Synthetic oligonucleotide
aagucuccuaagaggaaaga

SEQ ID NO: 3133 - RNA, 20 nt, Artificial Sequence
  Description of Artificial Sequence: Synthetic oligonucleotide
ccaccuuuuucugcaggaac

SEQ ID NO: 3134 - RNA, 20 nt, Artificial Sequence
  Description of Artificial Sequence: Synthetic oligonucleotide
agcugcaggcacagaaccag

SEQ ID NO: 3135 - RNA, 20 nt, Artificial Sequence
  Description of Artificial Sequence: Synthetic oligonucleotide
ggcacagaaccaguggcugc

SEQ ID NO: 3136 - RNA, 20 nt, Artificial Sequence
  Description of Artificial Sequence: Synthetic oligonucleotide
guuccugcaguccagccuga

SEQ ID NO: 3137 - RNA, 20 nt, Artificial Sequence
  Description of Artificial Sequence: Synthetic oligonucleotide
uggggguacuggggcaggga

SEQ ID NO: 3138 - RNA, 20 nt, Artificial Sequence
  Description of Artificial Sequence: Synthetic oligonucleotide
auucccucaacuuggugugg

SEQ ID NO: 3139 - RNA, 20 nt, Artificial Sequence
  Description of Artificial Sequence: Synthetic oligonucleotide
cggccagcaugcuuccuccu

SEQ ID NO: 3140 - RNA, 20 nt, Artificial Sequence
  Description of Artificial Sequence: Synthetic oligonucleotide
ugacuguuagacacaaaaca

SEQ ID NO: 3141 - RNA, 20 nt, Artificial Sequence
  Description of Artificial Sequence: Synthetic oligonucleotide
cuccugccaguuagcagucc

SEQ ID NO: 3142 - RNA, 20 nt, Artificial Sequence
  Description of Artificial Sequence: Synthetic oligonucleotide
acucaaaccuuucaggguug

SEQ ID NO: 3143 - RNA, 20 nt, Artificial Sequence
  Description of Artificial Sequence: Synthetic oligonucleotide
ccuggcaagacccccacucc

SEQ ID NO: 3144 - RNA, 20 nt, Artificial Sequence
  Description of Artificial Sequence: Synthetic oligonucleotide
uugaccugagggcgggggca

SEQ ID NO: 3145 - RNA, 20 nt, Artificial Sequence
  Description of Artificial Sequence: Synthetic oligonucleotide
cguggugcagcuucgugccc

SEQ ID NO: 3146 - RNA, 20 nt, Artificial Sequence
  Description of Artificial Sequence: Synthetic oligonucleotide
accuguccaaggcgugccca

SEQ ID NO: 3147 - RNA, 20 nt, Artificial Sequence
  Description of Artificial Sequence: Synthetic oligonucleotide
cugggucccaaaugccaccc

SEQ ID NO: 3148 - RNA, 20 nt, Artificial Sequence
  Description of Artificial Sequence: Synthetic oligonucleotide
ggauucugcggacagaagaa

SEQ ID NO: 3149 - RNA, 20 nt, Artificial Sequence
  Description of Artificial Sequence: Synthetic oligonucleotide
ggagcucaccugcauggggg

SEQ ID NO: 3150 - RNA, 20 nt, Artificial Sequence
  Description of Artificial Sequence: Synthetic oligonucleotide
uuugcugcaggaagaacaaa

SEQ ID NO: 3151 - RNA, 20 nt, Artificial Sequence
  Description of Artificial Sequence: Synthetic oligonucleotide
gcagcaaaugaaggaucagc

SEQ ID NO: 3152 - RNA, 20 nt, Artificial Sequence
  Description of Artificial Sequence: Synthetic oligonucleotide
acccuaagggcaggagccaa

SEQ ID NO: 3153 - RNA, 20 nt, Artificial Sequence
  Description of Artificial Sequence: Synthetic oligonucleotide
gaugauccaguuuuaccugg

SEQ ID NO: 3154 - RNA, 20 nt, Artificial Sequence
  Description of Artificial Sequence: Synthetic oligonucleotide
gaaccaagacccagacauca

SEQ ID NO: 3155 - RNA, 20 nt, Artificial Sequence
  Description of Artificial Sequence: Synthetic oligonucleotide
ccaggcagugugagucagcu

SEQ ID NO: 3156 - RNA, 20 nt, Artificial Sequence
  Description of Artificial Sequence: Synthetic oligonucleotide
uggcccuccagcuguaugug

SEQ ID NO: 3157 - RNA, 20 nt, Artificial Sequence
  Description of Artificial Sequence: Synthetic oligonucleotide
cuucaaaccacacagacgga

SEQ ID NO: 3158 - RNA, 20 nt, Artificial Sequence
  Description of Artificial Sequence: Synthetic oligonucleotide
uggguguccaguggaggaug

SEQ ID NO: 3159 - RNA, 20 nt, Artificial Sequence
  Description of Artificial Sequence: Synthetic oligonucleotide
gcuucaaaccacacagacgg

SEQ ID NO: 3160 - RNA, 20 nt, Artificial Sequence
  Description of Artificial Sequence: Synthetic oligonucleotide
uccauaccugaggagauacc

SEQ ID NO: 3161 - RNA, 20 nt, Artificial Sequence
  Description of Artificial Sequence: Synthetic oligonucleotide
ugacgguccaguuggagugc

SEQ ID NO: 3162 - RNA, 20 nt, Artificial Sequence
  Description of Artificial Sequence: Synthetic oligonucleotide
ccccauaccgugaaguuucc

SEQ ID NO: 3163 - RNA, 20 nt, Artificial Sequence
  Description of Artificial Sequence: Synthetic oligonucleotide
ugacucacacugccugguga

SEQ ID NO: 3164 - RNA, 20 nt, Artificial Sequence
  Description of Artificial Sequence: Synthetic oligonucleotide
cugacucacacugccuggug

SEQ ID NO: 3165 - RNA, 20 nt, Artificial Sequence
  Description of Artificial Sequence: Synthetic oligonucleotide
accaggcagugugagucagc

SEQ ID NO: 3166 - RNA, 20 nt, Artificial Sequence
  Description of Artificial Sequence: Synthetic oligonucleotide
uugaagagcuggggaagaga

SEQ ID NO: 3167 - RNA, 20 nt, Artificial Sequence
  Description of Artificial Sequence: Synthetic oligonucleotide
agcuccagucagauauuccc

SEQ ID NO: 3168 - RNA, 20 nt, Artificial Sequence
  Description of Artificial Sequence: Synthetic oligonucleotide
aguucaaaacucugagggcc

SEQ ID NO: 3169 - RNA, 20 nt, Artificial Sequence
  Description of Artificial Sequence: Synthetic oligonucleotide
uaguucaaaacucugagggc

SEQ ID NO: 3170 - RNA, 20 nt, Artificial Sequence
  Description of Artificial Sequence: Synthetic oligonucleotide
cugguuccacugucccguug

SEQ ID NO: 3171 - RNA, 20 nt, Artificial Sequence
  Description of Artificial Sequence: Synthetic oligonucleotide
gcugguuccacugucccguu

SEQ ID NO: 3172 - RNA, 20 nt, Artificial Sequence
  Description of Artificial Sequence: Synthetic oligonucleotide
uggcauuccaggguuaccug

SEQ ID NO: 3173 - RNA, 20 nt, Artificial Sequence
  Description of Artificial Sequence: Synthetic oligonucleotide
ggcugguuccacugucccgu

SEQ ID NO: 3174 - RNA, 20 nt, Artificial Sequence
  Description of Artificial Sequence: Synthetic oligonucleotide
gccggagaccuugaagagcg

SEQ ID NO: 3175 - RNA, 20 nt, Artificial Sequence
  Description of Artificial Sequence: Synthetic oligonucleotide
ggcggccgaggcggagaguu

SEQ ID NO: 3176 - RNA, 20 nt, Artificial Sequence
  Description of Artificial Sequence: Synthetic oligonucleotide
cguucucccacaccagcccg

SEQ ID NO: 3177 - RNA, 20 nt, Artificial Sequence
  Description of Artificial Sequence: Synthetic oligonucleotide
cgcgguuguaguccugcuug

SEQ ID NO: 3178 - RNA, 20 nt, Artificial Sequence
  Description of Artificial Sequence: Synthetic oligonucleotide
cuaccuuuuuuggcucccuc

SEQ ID NO: 3179 - RNA, 20 nt, Artificial Sequence
  Description of Artificial Sequence: Synthetic oligonucleotide
gucuuccaggugggaggguc

SEQ ID NO: 3180 - RNA, 20 nt, Artificial Sequence
  Description of Artificial Sequence: Synthetic oligonucleotide
cuccuacauguuuggggaaa

SEQ ID NO: 3181 - RNA, 20 nt, Artificial Sequence
  Description of Artificial Sequence: Synthetic oligonucleotide
auaccugggcugggagcgaa

SEQ ID NO: 3182 - RNA, 20 nt, Artificial Sequence
  Description of Artificial Sequence: Synthetic oligonucleotide
cauaccugggcugggagcga

SEQ ID NO: 3183 - RNA, 20 nt, Artificial Sequence
  Description of Artificial Sequence: Synthetic oligonucleotide
agccaagcagcucacccugg

SEQ ID NO: 3184 - RNA, 20 nt, Artificial Sequence
  Description of Artificial Sequence: Synthetic oligonucleotide
cccagcccagguauggugga

SEQ ID NO: 3185 - RNA, 20 nt, Artificial Sequence
  Description of Artificial Sequence: Synthetic oligonucleotide
cugcuaaaggagugcaggag

SEQ ID NO: 3186 - RNA, 20 nt, Artificial Sequence
  Description of Artificial Sequence: Synthetic oligonucleotide
uccuuaccauuuucacaagc

SEQ ID NO: 3187 - RNA, 20 nt, Artificial Sequence
  Description of Artificial Sequence: Synthetic oligonucleotide
ccuuaccauuuucacaagcu

SEQ ID NO: 3188 - RNA, 20 nt, Artificial Sequence
  Description of Artificial Sequence: Synthetic oligonucleotide
agucccuccagcuucggucg

SEQ ID NO: 3189 - RNA, 20 nt, Artificial Sequence
  Description of Artificial Sequence: Synthetic oligonucleotide
gucccuccagcuucggucga

SEQ ID NO: 3190 - RNA, 20 nt, Artificial Sequence
  Description of Artificial Sequence: Synthetic oligonucleotide
ucccuccagcuucggucgag

SEQ ID NO: 3191 - RNA, 20 nt, Artificial Sequence
  Description of Artificial Sequence: Synthetic oligonucleotide
uaccaaugucccaugacguu

SEQ ID NO: 3192 - RNA, 20 nt, Artificial Sequence
  Description of Artificial Sequence: Synthetic oligonucleotide
gccuugccagugguggccgc

SEQ ID NO: 3193 - RNA, 20 nt, Artificial Sequence
  Description of Artificial Sequence: Synthetic oligonucleotide
ccuugccagugguggccgcg

SEQ ID NO: 3194 - RNA, 20 nt, Artificial Sequence
  Description of Artificial Sequence: Synthetic oligonucleotide
gcacucaccugagaacgcca

SEQ ID NO: 3195 - RNA, 20 nt, Artificial Sequence
  Description of Artificial Sequence: Synthetic oligonucleotide
agucugcaaacacagagcuc

SEQ ID NO: 3196 - RNA, 20 nt, Artificial Sequence
  Description of Artificial Sequence: Synthetic oligonucleotide
ugugccagagcaggaucuac

SEQ ID NO: 3197 - RNA, 20 nt, Artificial Sequence
  Description of Artificial Sequence: Synthetic oligonucleotide
gugccagagcaggaucuacu

SEQ ID NO: 3198 - RNA, 20 nt, Artificial Sequence
  Description of Artificial Sequence: Synthetic oligonucleotide
gacacacagcaguucuuguc

SEQ ID NO: 3199 - RNA, 20 nt, Artificial Sequence
  Description of Artificial Sequence: Synthetic oligonucleotide
cugcaagcguuugcucacca

SEQ ID NO: 3200 - RNA, 20 nt, Artificial Sequence
  Description of Artificial Sequence: Synthetic oligonucleotide
uuccaggugacucuaugcuu

SEQ ID NO: 3201 - RNA, 20 nt, Artificial Sequence
  Description of Artificial Sequence: Synthetic oligonucleotide
ccuucucauggcaggugucc

SEQ ID NO: 3202 - RNA, 20 nt, Artificial Sequence
  Description of Artificial Sequence: Synthetic oligonucleotide
cccacagauucagggacucc

SEQ ID NO: 3203 - RNA, 20 nt, Artificial Sequence
  Description of Artificial Sequence: Synthetic oligonucleotide
acccacagauucagggacuc

SEQ ID NO: 3204 - RNA, 20 nt, Artificial Sequence
  Description of Artificial Sequence: Synthetic oligonucleotide
gcucuuuaccuuaaaaaugg

SEQ ID NO: 3205 - RNA, 20 nt, Artificial Sequence
  Description of Artificial Sequence: Synthetic oligonucleotide
uuacauuuuugcucuuccuc

SEQ ID NO: 3206 - RNA, 20 nt, Artificial Sequence
  Description of Artificial Sequence: Synthetic oligonucleotide
gaaggcugcacagucagggg

SEQ ID NO: 3207 - RNA, 20 nt, Artificial Sequence
  Description of Artificial Sequence: Synthetic oligonucleotide
aaggcugcacagucagggga

SEQ ID NO: 3208 - RNA, 20 nt, Artificial Sequence
  Description of Artificial Sequence: Synthetic oligonucleotide
acagaaggcugcacagucag

SEQ ID NO: 3209 - RNA, 20 nt, Artificial Sequence
  Description of Artificial Sequence: Synthetic oligonucleotide
caccaucugggagaaugcug

SEQ ID NO: 3210 - RNA, 20 nt, Artificial Sequence
  Description of Artificial Sequence: Synthetic oligonucleotide
ggagaaugcuguggacaaga

SEQ ID NO: 3211 - RNA, 20 nt, Artificial Sequence
  Description of Artificial Sequence: Synthetic oligonucleotide
gguacagaccucggaagaac

SEQ ID NO: 3212 - RNA, 20 nt, Artificial Sequence
  Description of Artificial Sequence: Synthetic oligonucleotide
cagaccucggaagaacuggc

SEQ ID NO: 3213 - RNA, 20 nt, Artificial Sequence
  Description of Artificial Sequence: Synthetic oligonucleotide
cugcagcucuggaaugacac

SEQ ID NO: 3214 - RNA, 20 nt, Artificial Sequence
  Description of Artificial Sequence: Synthetic oligonucleotide
gcacauccgggcggcccagg

SEQ ID NO: 3215 - RNA, 20 nt, Artificial Sequence
  Description of Artificial Sequence: Synthetic oligonucleotide
ggauacggccgggccccugg

SEQ ID NO: 3216 - RNA, 20 nt, Artificial Sequence
  Description of Artificial Sequence: Synthetic oligonucleotide
ucuggucagggcucggacac

SEQ ID NO: 3217 - RNA, 20 nt, Artificial Sequence
  Description of Artificial Sequence: Synthetic oligonucleotide
ggacaguacuuuuacccccg

SEQ ID NO: 3218 - RNA, 20 nt, Artificial Sequence
  Description of Artificial Sequence: Synthetic oligonucleotide
gagcaggagggcuucgccga

SEQ ID NO: 3219 - RNA, 20 nt, Artificial Sequence
  Description of Artificial Sequence: Synthetic oligonucleotide
gcgcagcugggcuugggccg

SEQ ID NO: 3220 - RNA, 20 nt, Artificial Sequence
  Description of Artificial Sequence: Synthetic oligonucleotide
ggaaccgcagaccgugccgg

SEQ ID NO: 3221 - DNA, 20 bp, Artificial Sequence
  Description of Artificial Sequence: Synthetic oligonucleotide
cagccgggacgccacgccgc

SEQ ID NO: 3222 - RNA, 20 nt, Artificial Sequence
  Description of Artificial Sequence: Synthetic oligonucleotide
agaccaagagcgcaucaaag

SEQ ID NO: 3223 - RNA, 20 nt, Artificial Sequence
  Description of Artificial Sequence: Synthetic oligonucleotide
caagcggcugcggaaccggc

SEQ ID NO: 3224 - RNA, 20 nt, Artificial Sequence
  Description of Artificial Sequence: Synthetic oligonucleotide
gcggcugcggaaccggcugg

SEQ ID NO: 3225 - RNA, 20 nt, Artificial Sequence
  Description of Artificial Sequence: Synthetic oligonucleotide
ucucuuuccaucuucugucg

SEQ ID NO: 3226 - RNA, 20 nt, Artificial Sequence
  Description of Artificial Sequence: Synthetic oligonucleotide
augacuuacccuccugcgug

SEQ ID NO: 3227 - RNA, 20 nt, Artificial Sequence
  Description of Artificial Sequence: Synthetic oligonucleotide
cuuacccuccugcgugugga

SEQ ID NO: 3228 - RNA, 20 nt, Artificial Sequence
  Description of Artificial Sequence: Synthetic oligonucleotide
ugggguucaaacauuccgcc

SEQ ID NO: 3229 - RNA, 20 nt, Artificial Sequence
  Description of Artificial Sequence: Synthetic oligonucleotide
agcuuucuguaaacaggggc

SEQ ID NO: 3230 - RNA, 20 nt, Artificial Sequence
  Description of Artificial Sequence: Synthetic oligonucleotide
uacugaccagcugaggagcc

SEQ ID NO: 3231 - RNA, 20 nt, Artificial Sequence
  Description of Artificial Sequence: Synthetic oligonucleotide
cuacugaccagcugaggagc

SEQ ID NO: 3232 - RNA, 20 nt, Artificial Sequence
  Description of Artificial Sequence: Synthetic oligonucleotide
caucuaagaaagacagaaac

SEQ ID NO: 3233 - RNA, 20 nt, Artificial Sequence
  Description of Artificial Sequence: Synthetic oligonucleotide
gggggcccuaaggacagucg

SEQ ID NO: 3234 - RNA, 20 nt, Artificial Sequence
  Description of Artificial Sequence: Synthetic oligonucleotide
ggggggcccuaaggacaguc

SEQ ID NO: 3235 - RNA, 20 nt, Artificial Sequence
  Description of Artificial Sequence: Synthetic oligonucleotide
ugucuuggggagaaaauaca

SEQ ID NO: 3236 - RNA, 20 nt, Artificial Sequence
  Description of Artificial Sequence: Synthetic oligonucleotide
ggccuaagagggagagaccc

SEQ ID NO: 3237 - RNA, 20 nt, Artificial Sequence
  Description of Artificial Sequence: Synthetic oligonucleotide
cccauaccuuagcguggaaa

SEQ ID NO: 3238 - RNA, 20 nt, Artificial Sequence
  Description of Artificial Sequence: Synthetic oligonucleotide
acccacccaugacagcuuaa

SEQ ID NO: 3239 - RNA, 20 nt, Artificial Sequence
  Description of Artificial Sequence: Synthetic oligonucleotide
uagaccuaccuuaaucaugg

SEQ ID NO: 3240 - RNA, 20 nt, Artificial Sequence
  Description of Artificial Sequence: Synthetic oligonucleotide
cacaacuccuggggacaguc

SEQ ID NO: 3241 - RNA, 20 nt, Artificial Sequence
  Description of Artificial Sequence: Synthetic oligonucleotide
aacuuacauagagaauaaag

SEQ ID NO: 3242 - RNA, 20 nt, Artificial Sequence
  Description of Artificial Sequence: Synthetic oligonucleotide
acuuacauagagaauaaaga

SEQ ID NO: 3243 - RNA, 20 nt, Artificial Sequence
  Description of Artificial Sequence: Synthetic oligonucleotide
gaaccagaucaggagccaac

SEQ ID NO: 3244 - RNA, 20 nt, Artificial Sequence
  Description of Artificial Sequence: Synthetic oligonucleotide
cuguguacugaggggcagaa

SEQ ID NO: 3245 - RNA, 20 nt, Artificial Sequence
  Description of Artificial Sequence: Synthetic oligonucleotide
gcuguguacugaggggcaga

SEQ ID NO: 3246 - RNA, 20 nt, Artificial Sequence
  Description of Artificial Sequence: Synthetic oligonucleotide
uguacugaggggcagaaggg

SEQ ID NO: 3247 - RNA, 20 nt, Artificial Sequence
  Description of Artificial Sequence: Synthetic oligonucleotide
ggugcucccaggagcggagg

SEQ ID NO: 3248 - RNA, 20 nt, Artificial Sequence
  Description of Artificial Sequence: Synthetic oligonucleotide
agaggaacaaggagacauug

SEQ ID NO: 3249 - RNA, 20 nt, Artificial Sequence
  Description of Artificial Sequence: Synthetic oligonucleotide
gacucacucuucuguuucua

SEQ ID NO: 3250 - RNA, 20 nt, Artificial Sequence
  Description of Artificial Sequence: Synthetic oligonucleotide
gaaaggcagcuuuuggcacc

SEQ ID NO: 3251 - RNA, 20 nt, Artificial Sequence
  Description of Artificial Sequence: Synthetic oligonucleotide
agccacagaagccaugggau

SEQ ID NO: 3252 - RNA, 20 nt, Artificial Sequence
  Description of Artificial Sequence: Synthetic oligonucleotide
cccccgggaguccaucaagu

SEQ ID NO: 3253 - RNA, 20 nt, Artificial Sequence
  Description of Artificial Sequence: Synthetic oligonucleotide
uaaccuaggaagaaaaaaga

SEQ ID NO: 3254 - RNA, 20 nt, Artificial Sequence
  Description of Artificial Sequence: Synthetic oligonucleotide
cucacccuuggccauguacu

SEQ ID NO: 3255 - RNA, 20 nt, Artificial Sequence
  Description of Artificial Sequence: Synthetic oligonucleotide
ccugaacuggaggugaacaa

SEQ ID NO: 3256 - RNA, 20 nt, Artificial Sequence
  Description of Artificial Sequence: Synthetic oligonucleotide
ugcaaucugaaaacagaaau

SEQ ID NO: 3257 - RNA, 20 nt, Artificial Sequence
  Description of Artificial Sequence: Synthetic oligonucleotide
caccuaaggaagaagauaug

SEQ ID NO: 3258 - RNA, 20 nt, Artificial Sequence
  Description of Artificial Sequence: Synthetic oligonucleotide
agcagcagccuuagagcaca

SEQ ID NO: 3259 - RNA, 20 nt, Artificial Sequence
  Description of Artificial Sequence: Synthetic oligonucleotide
cacucacccgcagggaggag

SEQ ID NO: 3260 - RNA, 20 nt, Artificial Sequence
  Description of Artificial Sequence: Synthetic oligonucleotide
aggauccuggagaggaagga

SEQ ID NO: 3261 - RNA, 20 nt, Artificial Sequence
  Description of Artificial Sequence: Synthetic oligonucleotide
ggauccuggagaggaaggag

SEQ ID NO: 3262 - RNA, 20 nt, Artificial Sequence
  Description of Artificial Sequence: Synthetic oligonucleotide
gaugaccaacucuggguagg

SEQ ID NO: 3263 - RNA, 20 nt, Artificial Sequence
  Description of Artificial Sequence: Synthetic oligonucleotide
ccuuacccucaggauuucuc

SEQ ID NO: 3264 - RNA, 20 nt, Artificial Sequence
  Description of Artificial Sequence: Synthetic oligonucleotide
gugauucaccgggauaucaa

SEQ ID NO: 3265 - RNA, 20 nt, Artificial Sequence
  Description of Artificial Sequence: Synthetic oligonucleotide
caacugugggaggaagaaaa

SEQ ID NO: 3266 - RNA, 20 nt, Artificial Sequence
  Description of Artificial Sequence: Synthetic oligonucleotide
gccucuuacucuguaaucau

SEQ ID NO: 3267 - RNA, 20 nt, Artificial Sequence
  Description of Artificial Sequence: Synthetic oligonucleotide
ucuuacucuguaaucauagg

SEQ ID NO: 3268 - RNA, 20 nt, Artificial Sequence
  Description of Artificial Sequence: Synthetic oligonucleotide
agagagcuggggagaggaga

SEQ ID NO: 3269 - RNA, 20 nt, Artificial Sequence
  Description of Artificial Sequence: Synthetic oligonucleotide
cugaacaggaaggagagcca

SEQ ID NO: 3270 - RNA, 20 nt, Artificial Sequence
  Description of Artificial Sequence: Synthetic oligonucleotide
auggaacuguuggaaaaagc

SEQ ID NO: 3271 - RNA, 20 nt, Artificial Sequence
  Description of Artificial Sequence: Synthetic oligonucleotide
uugagcagcagaaagaacag

SEQ ID NO: 3272 - RNA, 20 nt, Artificial Sequence
  Description of Artificial Sequence: Synthetic oligonucleotide
ggagagagcgggaagcuaga

SEQ ID NO: 3273 - RNA, 20 nt, Artificial Sequence
  Description of Artificial Sequence: Synthetic oligonucleotide
ccuucagcagcagcugcucc

SEQ ID NO: 3274 - RNA, 20 nt, Artificial Sequence
  Description of Artificial Sequence: Synthetic oligonucleotide
ggcacuccuuggagagggag

SEQ ID NO: 3275 - RNA, 20 nt, Artificial Sequence
  Description of Artificial Sequence: Synthetic oligonucleotide
cucccgccaucggcacuccu

SEQ ID NO: 3276 - RNA, 20 nt, Artificial Sequence
  Description of Artificial Sequence: Synthetic oligonucleotide
gaagcccagucuaagcagac

SEQ ID NO: 3277 - RNA, 20 nt, Artificial Sequence
  Description of Artificial Sequence: Synthetic oligonucleotide
gucgcuaccuguggcuccgc

SEQ ID NO: 3278 - RNA, 20 nt, Artificial Sequence
  Description of Artificial Sequence: Synthetic oligonucleotide
uagaccaagccuuuugggua

SEQ ID NO: 3279 - RNA, 20 nt, Artificial Sequence
  Description of Artificial Sequence: Synthetic oligonucleotide
gggcagcagaauagccaggc

SEQ ID NO: 3280 - RNA, 20 nt, Artificial Sequence
  Description of Artificial Sequence: Synthetic oligonucleotide
aggcuucugugggagagagu

SEQ ID NO: 3281 - RNA, 20 nt, Artificial Sequence
  Description of Artificial Sequence: Synthetic oligonucleotide
ugggucucagaguggcuccg

SEQ ID NO: 3282 - RNA, 20 nt, Artificial Sequence
  Description of Artificial Sequence: Synthetic oligonucleotide
augaugcuguuggguucaaa

SEQ ID NO: 3283 - RNA, 20 nt, Artificial Sequence
  Description of Artificial Sequence: Synthetic oligonucleotide
ugaugcuguuggguucaaaa

SEQ ID NO: 3284 - RNA, 20 nt, Artificial Sequence
  Description of Artificial Sequence: Synthetic oligonucleotide
auccuuacagcaggcuugag

SEQ ID NO: 3285 - RNA, 20 nt, Artificial Sequence
  Description of Artificial Sequence: Synthetic oligonucleotide
aauccuuacagcaggcuuga

SEQ ID NO: 3286 - RNA, 20 nt, Artificial Sequence
  Description of Artificial Sequence: Synthetic oligonucleotide
uaggccacagagugacaccc

SEQ ID NO: 3287 - RNA, 20 nt, Artificial Sequence
  Description of Artificial Sequence: Synthetic oligonucleotide
ccgaagacgauuucaacaaa

SEQ ID NO: 3288 - RNA, 20 nt, Artificial Sequence
  Description of Artificial Sequence: Synthetic oligonucleotide
aagcagggauggacaaccgu

SEQ ID NO: 3289 - RNA, 20 nt, Artificial Sequence
  Description of Artificial Sequence: Synthetic oligonucleotide
uccccagcccauugucugau

SEQ ID NO: 3290 - RNA, 20 nt, Artificial Sequence
  Description of Artificial Sequence: Synthetic oligonucleotide
gagauccgaucuguggaaac

SEQ ID NO: 3291 - RNA, 20 nt, Artificial Sequence
  Description of Artificial Sequence: Synthetic oligonucleotide
cacucaccacacagagccau

SEQ ID NO: 3292 - RNA, 20 nt, Artificial Sequence
  Description of Artificial Sequence: Synthetic oligonucleotide
uuaccagaaccugucuccag

SEQ ID NO: 3293 - RNA, 20 nt, Artificial Sequence
  Description of Artificial Sequence: Synthetic oligonucleotide
agcagcacuaaggagaaaaa

SEQ ID NO: 3294 - RNA, 20 nt, Artificial Sequence
  Description of Artificial Sequence: Synthetic oligonucleotide
gcagcacuaaggagaaaaaa

SEQ ID NO: 3295 - RNA, 20 nt, Artificial Sequence
  Description of Artificial Sequence: Synthetic oligonucleotide
agguccuaggaagcaaauac

SEQ ID NO: 3296 - RNA, 20 nt, Artificial Sequence
  Description of Artificial Sequence: Synthetic oligonucleotide
gguccuaggaagcaaauaca

SEQ ID NO: 3297 - RNA, 20 nt, Artificial Sequence
  Description of Artificial Sequence: Synthetic oligonucleotide
cagaaucuaaagggcagaag

SEQ ID NO: 3298 - RNA, 20 nt, Artificial Sequence
  Description of Artificial Sequence: Synthetic oligonucleotide
auccaguucagcaugaucuc

SEQ ID NO: 3299 - RNA, 20 nt, Artificial Sequence
  Description of Artificial Sequence: Synthetic oligonucleotide
aauaccucaguugccggugc

SEQ ID NO: 3300 - RNA, 20 nt, Artificial Sequence
  Description of Artificial Sequence: Synthetic oligonucleotide
cccacugaccaaauaucaac

SEQ ID NO: 3301 - RNA, 20 nt, Artificial Sequence
  Description of Artificial Sequence: Synthetic oligonucleotide
uaucuaaugguggaccauaa

SEQ ID NO: 3302 - RNA, 20 nt, Artificial Sequence
  Description of Artificial Sequence: Synthetic oligonucleotide
auaucuuagaugccuaguca

SEQ ID NO: 3303 - RNA, 20 nt, Artificial Sequence
  Description of Artificial Sequence: Synthetic oligonucleotide
cagcagauuaugcgucugac

SEQ ID NO: 3304 - RNA, 20 nt, Artificial Sequence
  Description of Artificial Sequence: Synthetic oligonucleotide
uuucuugccugaaaaaacaa

SEQ ID NO: 3305 - RNA, 20 nt, Artificial Sequence
  Description of Artificial Sequence: Synthetic oligonucleotide
cagcuaucaguaccauagac

SEQ ID NO: 3306 - RNA, 20 nt, Artificial Sequence
  Description of Artificial Sequence: Synthetic oligonucleotide
augaucaguccuuugaaagc

SEQ ID NO: 3307 - RNA, 20 nt, Artificial Sequence
  Description of Artificial Sequence: Synthetic oligonucleotide
gucaggccuagaaauuggga

SEQ ID NO: 3308 - RNA, 20 nt, Artificial Sequence
  Description of Artificial Sequence: Synthetic oligonucleotide
aagucaccugcagagaagga

SEQ ID NO: 3309 - RNA, 20 nt, Artificial Sequence
  Description of Artificial Sequence: Synthetic oligonucleotide
agucaccugcagagaaggau

SEQ ID NO: 3310 - RNA, 20 nt, Artificial Sequence
  Description of Artificial Sequence: Synthetic oligonucleotide
ugggcccaccucgaugaugu

SEQ ID NO: 3311 - RNA, 20 nt, Artificial Sequence
  Description of Artificial Sequence: Synthetic oligonucleotide
ggaacagagcccccugcugg

SEQ ID NO: 3312 - RNA, 20 nt, Artificial Sequence
  Description of Artificial Sequence: Synthetic oligonucleotide
caaguaccgacgcgccagcg

SEQ ID NO: 3313 - RNA, 20 nt, Artificial Sequence
  Description of Artificial Sequence: Synthetic oligonucleotide
agcgccuggggggaaggggc

SEQ ID NO: 3314 - RNA, 20 nt, Artificial Sequence
  Description of Artificial Sequence: Synthetic oligonucleotide
aaugaugcagaguuauagac

SEQ ID NO: 3315 - RNA, 20 nt, Artificial Sequence
  Description of Artificial Sequence: Synthetic oligonucleotide
caguugacuagacagaaaga

SEQ ID NO: 3316 - RNA, 20 nt, Artificial Sequence
  Description of Artificial Sequence: Synthetic oligonucleotide
uugacuagacagaaagaugg

SEQ ID NO: 3317 - RNA, 20 nt, Artificial Sequence
  Description of Artificial Sequence: Synthetic oligonucleotide
ugacuagacagaaagaugga

SEQ ID NO: 3318 - RNA, 20 nt, Artificial Sequence
  Description of Artificial Sequence: Synthetic oligonucleotide
cccagcagccagcacuacag

SEQ ID NO: 3319 - RNA, 20 nt, Artificial Sequence
  Description of Artificial Sequence: Synthetic oligonucleotide
ugcacucaccaacagggcug

SEQ ID NO: 3320 - RNA, 20 nt, Artificial Sequence
  Description of Artificial Sequence: Synthetic oligonucleotide
cucaccaacagggcuggggc

SEQ ID NO: 3321 - RNA, 20 nt, Artificial Sequence
  Description of Artificial Sequence: Synthetic oligonucleotide
accugcgagucaucacuucc

SEQ ID NO: 3322 - RNA, 20 nt, Artificial Sequence
  Description of Artificial Sequence: Synthetic oligonucleotide
cucaccuguguuguaggcag

SEQ ID NO: 3323 - RNA, 20 nt, Artificial Sequence
  Description of Artificial Sequence: Synthetic oligonucleotide
ucaccuguguuguaggcagu

SEQ ID NO: 3324 - RNA, 20 nt, Artificial Sequence
  Description of Artificial Sequence: Synthetic oligonucleotide
accucagcaacagucccacc

SEQ ID NO: 3325 - RNA, 20 nt, Artificial Sequence
  Description of Artificial Sequence: Synthetic oligonucleotide
cccgggcuggaggcaggcaa

SEQ ID NO: 3326 - RNA, 20 nt, Artificial Sequence
  Description of Artificial Sequence: Synthetic oligonucleotide
augucugugaagagaggaga

SEQ ID NO: 3327 - RNA, 20 nt, Artificial Sequence
  Description of Artificial Sequence: Synthetic oligonucleotide
uuugcagcgcauuggcaagu

SEQ ID NO: 3328 - RNA, 20 nt, Artificial Sequence
  Description of Artificial Sequence: Synthetic oligonucleotide
uccggcgaauggcugacgca

SEQ ID NO: 3329 - RNA, 20 nt, Artificial Sequence
  Description of Artificial Sequence: Synthetic oligonucleotide
cgaggaccuggaaaacaaag

SEQ ID NO: 3330 - RNA, 20 nt, Artificial Sequence
  Description of Artificial Sequence: Synthetic oligonucleotide
cacuuacugguaaugaaccc

SEQ ID NO: 3331 - RNA, 20 nt, Artificial Sequence
  Description of Artificial Sequence: Synthetic oligonucleotide
cuccgaguccuugauucauu

SEQ ID NO: 3332 - RNA, 20 nt, Artificial Sequence
  Description of Artificial Sequence: Synthetic oligonucleotide
cagauuccauuuuccccaag

SEQ ID NO: 3333 - RNA, 20 nt, Artificial Sequence
  Description of Artificial Sequence: Synthetic oligonucleotide
ucagauuccauuuuccccaa

SEQ ID NO: 3334 - RNA, 20 nt, Artificial Sequence
  Description of Artificial Sequence: Synthetic oligonucleotide
gaaggccaugccuggaacac

SEQ ID NO: 3335 - RNA, 20 nt, Artificial Sequence
  Description of Artificial Sequence: Synthetic oligonucleotide
uuaccuugguuucucgaaga

SEQ ID NO: 3336 - RNA, 20 nt, Artificial Sequence
  Description of Artificial Sequence: Synthetic oligonucleotide
augcuuaccucucucagagu

SEQ ID NO: 3337 - RNA, 20 nt, Artificial Sequence
  Description of Artificial Sequence: Synthetic oligonucleotide
caacaaucaggaggaaguag

SEQ ID NO: 3338 - RNA, 20 nt, Artificial Sequence
  Description of Artificial Sequence: Synthetic oligonucleotide
guggccacaucacuugccca

SEQ ID NO: 3339 - RNA, 20 nt, Artificial Sequence
  Description of Artificial Sequence: Synthetic oligonucleotide
gcccgggcaguccugcaagc

SEQ ID NO: 3340 - RNA, 20 nt, Artificial Sequence
  Description of Artificial Sequence: Synthetic oligonucleotide
guaccugaagaggaagagaa

SEQ ID NO: 3341 - RNA, 20 nt, Artificial Sequence
  Description of Artificial Sequence: Synthetic oligonucleotide
cccugccgggacuucaucaa

SEQ ID NO: 3342 - RNA, 20 nt, Artificial Sequence
  Description of Artificial Sequence: Synthetic oligonucleotide
uuaccauggcaucguagcgc

SEQ ID NO: 3343 - DNA, 20 bp, Artificial Sequence
  Description of Artificial Sequence: Synthetic oligonucleotide
aggccacagcaccgcgccca

SEQ ID NO: 3344 - RNA, 20 nt, Artificial Sequence
  Description of Artificial Sequence: Synthetic oligonucleotide
cgcucagaaagugaggggug

SEQ ID NO: 3345 - RNA, 20 nt, Artificial Sequence
  Description of Artificial Sequence: Synthetic oligonucleotide
guaguccaggccuaugcuuu

SEQ ID NO: 3346 - RNA, 20 nt, Artificial Sequence
  Description of Artificial Sequence: Synthetic oligonucleotide
gaucuagaagaaagaaaaga

SEQ ID NO: 3347 - RNA, 20 nt, Artificial Sequence
  Description of Artificial Sequence: Synthetic oligonucleotide
uuaccauugcaucacaaauc

SEQ ID NO: 3348 - RNA, 20 nt, Artificial Sequence
  Description of Artificial Sequence: Synthetic oligonucleotide
gugacuuaccgcccaccugc

SEQ ID NO: 3349 - RNA, 20 nt, Artificial Sequence
  Description of Artificial Sequence: Synthetic oligonucleotide
cucccagguaauugugccug

SEQ ID NO: 3350 - RNA, 20 nt, Artificial Sequence
  Description of Artificial Sequence: Synthetic oligonucleotide
aggugaccaagauaucaacg

SEQ ID NO: 3351 - RNA, 20 nt, Artificial Sequence
  Description of Artificial Sequence: Synthetic oligonucleotide
ggucggaucaaguuuuccac

SEQ ID NO: 3352 - RNA, 20 nt, Artificial Sequence
  Description of Artificial Sequence: Synthetic oligonucleotide
uuaucauccugaaacaagag

SEQ ID NO: 3353 - RNA, 20 nt, Artificial Sequence
  Description of Artificial Sequence: Synthetic oligonucleotide
uucagucugaaaaagaagag

SEQ ID NO: 3354 - RNA, 20 nt, Artificial Sequence
  Description of Artificial Sequence: Synthetic oligonucleotide
aaggaacagacgggcucuga

SEQ ID NO: 3355 - RNA, 20 nt, Artificial Sequence
  Description of Artificial Sequence: Synthetic oligonucleotide
gaaauuaccuuuugcagaag

SEQ ID NO: 3356 - RNA, 20 nt, Artificial Sequence
  Description of Artificial Sequence: Synthetic oligonucleotide
agaaauuaccuuuugcagaa

SEQ ID NO: 3357 - RNA, 20 nt, Artificial Sequence
  Description of Artificial Sequence: Synthetic oligonucleotide
guugccugagaaagaaaaag

SEQ ID NO: 3358 - RNA, 20 nt, Artificial Sequence
  Description of Artificial Sequence: Synthetic oligonucleotide
cucucccaggcacaagacac

SEQ ID NO: 3359 - RNA, 20 nt, Artificial Sequence
  Description of Artificial Sequence: Synthetic oligonucleotide
ccgccaugccggccgcgcug

SEQ ID NO: 3360 - RNA, 20 nt, Artificial Sequence
  Description of Artificial Sequence: Synthetic oligonucleotide
gaagugaccaaguucacucc

SEQ ID NO: 3361 - RNA, 20 nt, Artificial Sequence
  Description of Artificial Sequence: Synthetic oligonucleotide
caauccaccugaaagauaaa

SEQ ID NO: 3362 - RNA, 20 nt, Artificial Sequence
  Description of Artificial Sequence: Synthetic oligonucleotide
aauccaccugaaagauaaaa

SEQ ID NO: 3363 - RNA, 20 nt, Artificial Sequence
  Description of Artificial Sequence: Synthetic oligonucleotide
guuauuucagauauucagcc

SEQ ID NO: 3364 - RNA, 20 nt, Artificial Sequence
  Description of Artificial Sequence: Synthetic oligonucleotide
uguuuucacaagguuguaau

SEQ ID NO: 3365 - RNA, 20 nt, Artificial Sequence
  Description of Artificial Sequence: Synthetic oligonucleotide
uggauucagcaguacaguuu

SEQ ID NO: 3366 - RNA, 20 nt, Artificial Sequence
  Description of Artificial Sequence: Synthetic oligonucleotide
aaaacacagguaaguguuug

SEQ ID NO: 3367 - RNA, 20 nt, Artificial Sequence
  Description of Artificial Sequence: Synthetic oligonucleotide
aaacacagguaaguguuugc

SEQ ID NO: 3368 - RNA, 20 nt, Artificial Sequence
  Description of Artificial Sequence: Synthetic oligonucleotide
aacacagguaaguguuugcg

SEQ ID NO: 3369 - RNA, 20 nt, Artificial Sequence
  Description of Artificial Sequence: Synthetic oligonucleotide
ugaacaaaugaagacuaaaa

SEQ ID NO: 3370 - RNA, 20 nt, Artificial Sequence
  Description of Artificial Sequence: Synthetic oligonucleotide
acuagagcagguaaccgggg

SEQ ID NO: 3371 - RNA, 20 nt, Artificial Sequence
  Description of Artificial Sequence: Synthetic oligonucleotide
aucuccggccagucccugag

SEQ ID NO: 3372 - RNA, 20 nt, Artificial Sequence
  Description of Artificial Sequence: Synthetic oligonucleotide
gacagaugcagaucacccug

SEQ ID NO: 3373 - RNA, 20 nt, Artificial Sequence
  Description of Artificial Sequence: Synthetic oligonucleotide
aggaaguccagacaucggcc

SEQ ID NO: 3374 - RNA, 20 nt, Artificial Sequence
  Description of Artificial Sequence: Synthetic oligonucleotide
uggauucccaggacagcaca

SEQ ID NO: 3375 - RNA, 20 nt, Artificial Sequence
  Description of Artificial Sequence: Synthetic oligonucleotide
gcccaccuuguuaguuucac

SEQ ID NO: 3376 - RNA, 20 nt, Artificial Sequence
  Description of Artificial Sequence: Synthetic oligonucleotide
aaaccuucaggagaaggaag

SEQ ID NO: 3377 - RNA, 20 nt, Artificial Sequence
  Description of Artificial Sequence: Synthetic oligonucleotide
gcugagaucuaggagacaaa

SEQ ID NO: 3378 - RNA, 20 nt, Artificial Sequence
  Description of Artificial Sequence: Synthetic oligonucleotide
gauacagacucucaacagag

SEQ ID NO: 3379 - RNA, 20 nt, Artificial Sequence
  Description of Artificial Sequence: Synthetic oligonucleotide
ccauucaaggggacccacag

SEQ ID NO: 3380 - RNA, 20 nt, Artificial Sequence
  Description of Artificial Sequence: Synthetic oligonucleotide
ggggcagucgcuuacaguuc

SEQ ID NO: 3381 - RNA, 20 nt, Artificial Sequence
  Description of Artificial Sequence: Synthetic oligonucleotide
acuuacccucugacuucaua

SEQ ID NO: 3382 - RNA, 20 nt, Artificial Sequence
  Description of Artificial Sequence: Synthetic oligonucleotide
acagagcaaaaaaugaccag

SEQ ID NO: 3383 - RNA, 20 nt, Artificial Sequence
  Description of Artificial Sequence: Synthetic oligonucleotide
uuaccuguuucuccaguagu

SEQ ID NO: 3384 - RNA, 20 nt, Artificial Sequence
  Description of Artificial Sequence: Synthetic oligonucleotide
acgccuacaauuggaaaaca

SEQ ID NO: 3385 - RNA, 20 nt, Artificial Sequence
  Description of Artificial Sequence: Synthetic oligonucleotide
cgccuacaauuggaaaacaa

SEQ ID NO: 3386 - RNA, 20 nt, Artificial Sequence
  Description of Artificial Sequence: Synthetic oligonucleotide
uuccugcaggauuacuuuga

SEQ ID NO: 3387 - RNA, 20 nt, Artificial Sequence
  Description of Artificial Sequence: Synthetic oligonucleotide
ugcugagcuguuaauaaaac

SEQ ID NO: 3388 - RNA, 20 nt, Artificial Sequence
  Description of Artificial Sequence: Synthetic oligonucleotide
ucacuuacuucauauuucuu

SEQ ID NO: 3389 - RNA, 20 nt, Artificial Sequence
  Description of Artificial Sequence: Synthetic oligonucleotide
ccagccgcagccccuaaguc

SEQ ID NO: 3390 - RNA, 20 nt, Artificial Sequence
  Description of Artificial Sequence: Synthetic oligonucleotide
uggccgggccaggaugggag

SEQ ID NO: 3391 - RNA, 20 nt, Artificial Sequence
  Description of Artificial Sequence: Synthetic oligonucleotide
acgggcagcuagugagccag

SEQ ID NO: 3392 - RNA, 20 nt, Artificial Sequence
  Description of Artificial Sequence: Synthetic oligonucleotide
cgggcagcuagugagccaga

SEQ ID NO: 3393 - RNA, 20 nt, Artificial Sequence
  Description of Artificial Sequence: Synthetic oligonucleotide
ggccuggcagggauggaggg

SEQ ID NO: 3394 - RNA, 20 nt, Artificial Sequence
  Description of Artificial Sequence: Synthetic oligonucleotide
cauggccuggcagggaugga

SEQ ID NO: 3395 - RNA, 20 nt, Artificial Sequence
  Description of Artificial Sequence: Synthetic oligonucleotide
ccauggccuggcagggaugg

SEQ ID NO: 3396 - RNA, 20 nt, Artificial Sequence
  Description of Artificial Sequence: Synthetic oligonucleotide
uaacgucccaguucugauuc

SEQ ID NO: 3397 - RNA, 20 nt, Artificial Sequence
  Description of Artificial Sequence: Synthetic oligonucleotide
gaaucagaacugggacguua

SEQ ID NO: 3398 - RNA, 20 nt, Artificial Sequence
  Description of Artificial Sequence: Synthetic oligonucleotide
ugcaccugggggcaggccaa

SEQ ID NO: 3399 - RNA, 20 nt, Artificial Sequence
  Description of Artificial Sequence: Synthetic oligonucleotide
ucauaccugguggcauaggc

SEQ ID NO: 3400 - RNA, 20 nt, Artificial Sequence
  Description of Artificial Sequence: Synthetic oligonucleotide
ccugcugcagaucuucccug

SEQ ID NO: 3401 - RNA, 20 nt, Artificial Sequence
  Description of Artificial Sequence: Synthetic oligonucleotide
uaccuggagaccaggguggu

SEQ ID NO: 3402 - RNA, 20 nt, Artificial Sequence
  Description of Artificial Sequence: Synthetic oligonucleotide
ggcguaccuggagaccaggg

SEQ ID NO: 3403 - RNA, 20 nt, Artificial Sequence
  Description of Artificial Sequence: Synthetic oligonucleotide
ccugaugcugggggugagag

SEQ ID NO: 3404 - RNA, 20 nt, Artificial Sequence
  Description of Artificial Sequence: Synthetic oligonucleotide
uccugaugcugggggugaga

SEQ ID NO: 3405 - RNA, 20 nt, Artificial Sequence
  Description of Artificial Sequence: Synthetic oligonucleotide
cggcaguacugcgagcugug

SEQ ID NO: 3406 - RNA, 20 nt, Artificial Sequence
  Description of Artificial Sequence: Synthetic oligonucleotide
cggacagcagaucggcgacg

SEQ ID NO: 3407 - RNA, 20 nt, Artificial Sequence
  Description of Artificial Sequence: Synthetic oligonucleotide
gcuucuuccaguccugacgc

SEQ ID NO: 3408 - RNA, 20 nt, Artificial Sequence
  Description of Artificial Sequence: Synthetic oligonucleotide
uacuaccuuguagcauaugc

SEQ ID NO: 3409 - RNA, 20 nt, Artificial Sequence
  Description of Artificial Sequence: Synthetic oligonucleotide
auacuucgaauuuuuccaga

SEQ ID NO: 3410 - RNA, 20 nt, Artificial Sequence
  Description of Artificial Sequence: Synthetic oligonucleotide
gucaagcagcugcacugcac

SEQ ID NO: 3411 - RNA, 20 nt, Artificial Sequence
  Description of Artificial Sequence: Synthetic oligonucleotide
ucaagcagcugcacugcacc

SEQ ID NO: 3412 - RNA, 20 nt, Artificial Sequence
  Description of Artificial Sequence: Synthetic oligonucleotide
caagcagcugcacugcaccg

SEQ ID NO: 3413 - RNA, 20 nt, Artificial Sequence
  Description of Artificial Sequence: Synthetic oligonucleotide
guagcugaaagacacaaaga

SEQ ID NO: 3414 - RNA, 20 nt, Artificial Sequence
  Description of Artificial Sequence: Synthetic oligonucleotide
uagcugaaagacacaaagaa

SEQ ID NO: 3415 - RNA, 20 nt, Artificial Sequence
  Description of Artificial Sequence: Synthetic oligonucleotide
cuauuaccugguugcguaag

SEQ ID NO: 3416 - RNA, 20 nt, Artificial Sequence
  Description of Artificial Sequence: Synthetic oligonucleotide
uauuaccugguugcguaaga

SEQ ID NO: 3417 - RNA, 20 nt, Artificial Sequence
  Description of Artificial Sequence: Synthetic oligonucleotide
auccugcggauauuuccaga

SEQ ID NO: 3418 - RNA, 20 nt, Artificial Sequence
  Description of Artificial Sequence: Synthetic oligonucleotide
uccugcggauauuuccagag

SEQ ID NO: 3419 - RNA, 20 nt, Artificial Sequence
  Description of Artificial Sequence: Synthetic oligonucleotide
ucccuggguuggggacagaa

SEQ ID NO: 3420 - RNA, 20 nt, Artificial Sequence
  Description of Artificial Sequence: Synthetic oligonucleotide
auaccugcuugauggugcug

SEQ ID NO: 3421 - RNA, 20 nt, Artificial Sequence
  Description of Artificial Sequence: Synthetic oligonucleotide
ccuugguccagaauuccaug

SEQ ID NO: 3422 - RNA, 20 nt, Artificial Sequence
  Description of Artificial Sequence: Synthetic oligonucleotide
gcagcuggagggacagucac

SEQ ID NO: 3423 - RNA, 20 nt, Artificial Sequence
  Description of Artificial Sequence: Synthetic oligonucleotide
gcggugccacagcagcugga

SEQ ID NO: 3424 - RNA, 20 nt, Artificial Sequence
  Description of Artificial Sequence: Synthetic oligonucleotide
cgcggugccacagcagcugg

SEQ ID NO: 3425 - RNA, 20 nt, Artificial Sequence
  Description of Artificial Sequence: Synthetic oligonucleotide
ggcccccagguuugagccga

SEQ ID NO: 3426 - RNA, 20 nt, Artificial Sequence
  Description of Artificial Sequence: Synthetic oligonucleotide
aggcccccagguuugagccg

SEQ ID NO: 3427 - RNA, 20 nt, Artificial Sequence
  Description of Artificial Sequence: Synthetic oligonucleotide
cucuccuguggggaggaggg

SEQ ID NO: 3428 - RNA, 20 nt, Artificial Sequence
  Description of Artificial Sequence: Synthetic oligonucleotide
aagcucuccuguggggagga

SEQ ID NO: 3429 - RNA, 20 nt, Artificial Sequence
  Description of Artificial Sequence: Synthetic oligonucleotide
cucaccuggaacuggcagag

SEQ ID NO: 3430 - RNA, 20 nt, Artificial Sequence
  Description of Artificial Sequence: Synthetic oligonucleotide
ucaccuggaacuggcagagc

SEQ ID NO: 3431 - RNA, 20 nt, Artificial Sequence
  Description of Artificial Sequence: Synthetic oligonucleotide
gauguacugagacggggugc

SEQ ID NO: 3432 - RNA, 20 nt, Artificial Sequence
  Description of Artificial Sequence: Synthetic oligonucleotide
auguacugagacggggugca

SEQ ID NO: 3433 - RNA, 20 nt, Artificial Sequence
  Description of Artificial Sequence: Synthetic oligonucleotide
ucucaccuucuucgcaggaa

SEQ ID NO: 3434 - RNA, 20 nt, Artificial Sequence
  Description of Artificial Sequence: Synthetic oligonucleotide
cucaccuucuucgcaggaau

SEQ ID NO: 3435 - RNA, 20 nt, Artificial Sequence
  Description of Artificial Sequence: Synthetic oligonucleotide
aggcugggggccggggaagc

SEQ ID NO: 3436 - RNA, 20 nt, Artificial Sequence
  Description of Artificial Sequence: Synthetic oligonucleotide
ccccaccuucauccgcucgu

SEQ ID NO: 3437 - RNA, 20 nt, Artificial Sequence
  Description of Artificial Sequence: Synthetic oligonucleotide
caccagcuguagaaggugcc

SEQ ID NO: 3438 - RNA, 20 nt, Artificial Sequence
  Description of Artificial Sequence: Synthetic oligonucleotide
ccaccagcuguagaaggugc

SEQ ID NO: 3439 - RNA, 20 nt, Artificial Sequence
  Description of Artificial Sequence: Synthetic oligonucleotide
gugcaggccgggcuuuucca

SEQ ID NO: 3440 - RNA, 20 nt, Artificial Sequence
  Description of Artificial Sequence: Synthetic oligonucleotide
guccugcagaaggacagggc

SEQ ID NO: 3441 - RNA, 20 nt, Artificial Sequence
  Description of Artificial Sequence: Synthetic oligonucleotide
ggcaguccugcagaaggaca

SEQ ID NO: 3442 - RNA, 20 nt, Artificial Sequence
  Description of Artificial Sequence: Synthetic oligonucleotide
gggcaguccugcagaaggac

SEQ ID NO: 3443 - RNA, 20 nt, Artificial Sequence
  Description of Artificial Sequence: Synthetic oligonucleotide
caaggaccagcuuaagaccg

SEQ ID NO: 3444 - RNA, 20 nt, Artificial Sequence
  Description of Artificial Sequence: Synthetic oligonucleotide
acaaggaccagcuuaagacc

SEQ ID NO: 3445 - RNA, 20 nt, Artificial Sequence
  Description of Artificial Sequence: Synthetic oligonucleotide
cacugaccuucuccagggcg

SEQ ID NO: 3446 - RNA, 20 nt, Artificial Sequence
  Description of Artificial Sequence: Synthetic oligonucleotide
ccacugaccuucuccagggc

SEQ ID NO: 3447 - RNA, 20 nt, Artificial Sequence
  Description of Artificial Sequence: Synthetic oligonucleotide
aggcgcauccacagcagcuc

SEQ ID NO: 3448 - RNA, 20 nt, Artificial Sequence
  Description of Artificial Sequence: Synthetic oligonucleotide
uuuguugcagaucuuggagc

SEQ ID NO: 3449 - RNA, 20 nt, Artificial Sequence
  Description of Artificial Sequence: Synthetic oligonucleotide
uguugcagaucuuggagcug

SEQ ID NO: 3450 - RNA, 20 nt, Artificial Sequence
  Description of Artificial Sequence: Synthetic oligonucleotide
uuguugcagaucuuggagcu

SEQ ID NO: 3451 - RNA, 20 nt, Artificial Sequence
  Description of Artificial Sequence: Synthetic oligonucleotide
agcugcugaggggugugggc

SEQ ID NO: 3452 - RNA, 20 nt, Artificial Sequence
  Description of Artificial Sequence: Synthetic oligonucleotide
cugcagcugcugaggggugu

SEQ ID NO: 3453 - RNA, 20 nt, Artificial Sequence
  Description of Artificial Sequence: Synthetic oligonucleotide
gcugcagcugcugaggggug

SEQ ID NO: 3454 - RNA, 20 nt, Artificial Sequence
  Description of Artificial Sequence: Synthetic oligonucleotide
uguggcccaggugggugggg

SEQ ID NO: 3455 - RNA, 20 nt, Artificial Sequence
  Description of Artificial Sequence: Synthetic oligonucleotide
agagcaucuggggggagccg

SEQ ID NO: 3456 - RNA, 20 nt, Artificial Sequence
  Description of Artificial Sequence: Synthetic oligonucleotide
aucgucccugcagggaagga

SEQ ID NO: 3457 - RNA, 20 nt, Artificial Sequence
  Description of Artificial Sequence: Synthetic oligonucleotide
gcuaccggaggugccagaaa

SEQ ID NO: 3458 - RNA, 20 nt, Artificial Sequence
  Description of Artificial Sequence: Synthetic oligonucleotide
ggagcuggaaggugaaggga

SEQ ID NO: 3459 - RNA, 20 nt, Artificial Sequence
  Description of Artificial Sequence: Synthetic oligonucleotide
cggagcuggaaggugaaggg

SEQ ID NO: 3460 - RNA, 20 nt, Artificial Sequence
  Description of Artificial Sequence: Synthetic oligonucleotide
ucucggagcuggaaggugaa

SEQ ID NO: 3461 - RNA, 20 nt, Artificial Sequence
  Description of Artificial Sequence: Synthetic oligonucleotide
gaugaagcaggugaggccca

SEQ ID NO: 3462 - RNA, 20 nt, Artificial Sequence
  Description of Artificial Sequence: Synthetic oligonucleotide
ccccuggugggcagauggga

SEQ ID NO: 3463 - RNA, 20 nt, Artificial Sequence
  Description of Artificial Sequence: Synthetic oligonucleotide
cccccuggugggcagauggg

SEQ ID NO: 3464 - RNA, 20 nt, Artificial Sequence
  Description of Artificial Sequence: Synthetic oligonucleotide
cuucccccuggugggcagau

SEQ ID NO: 3465 - RNA, 20 nt, Artificial Sequence
  Description of Artificial Sequence: Synthetic oligonucleotide
gcuucccccuggugggcaga

SEQ ID NO: 3466 - RNA, 20 nt, Artificial Sequence
  Description of Artificial Sequence: Synthetic oligonucleotide
cucaccagacuucagccagc

SEQ ID NO: 3467 - RNA, 20 nt, Artificial Sequence
  Description of Artificial Sequence: Synthetic oligonucleotide
ucaccagacuucagccagca

SEQ ID NO: 3468 - RNA, 20 nt, Artificial Sequence
  Description of Artificial Sequence: Synthetic oligonucleotide
acgcugccaggccagagagc

SEQ ID NO: 3469 - RNA, 20 nt, Artificial Sequence
  Description of Artificial Sequence: Synthetic oligonucleotide
cacgcugccaggccagagag

SEQ ID NO: 3470 - RNA, 20 nt, Artificial Sequence
  Description of Artificial Sequence: Synthetic oligonucleotide
gauccacaggggcuucaucu

SEQ ID NO: 3471 - RNA, 20 nt, Artificial Sequence
  Description of Artificial Sequence: Synthetic oligonucleotide
ggucugugccaccggccggu

SEQ ID NO: 3472 - RNA, 20 nt, Artificial Sequence
  Description of Artificial Sequence: Synthetic oligonucleotide
aggucugugccaccggccgg

SEQ ID NO: 3473 - RNA, 20 nt, Artificial Sequence
  Description of Artificial Sequence: Synthetic oligonucleotide
cggaggucugugccaccggc

SEQ ID NO: 3474 - RNA, 20 nt, Artificial Sequence
  Description of Artificial Sequence: Synthetic oligonucleotide
ccugcagaugauccagcuca

SEQ ID NO: 3475 - RNA, 20 nt, Artificial Sequence
  Description of Artificial Sequence: Synthetic oligonucleotide
auccuaggcaagggggaaga

SEQ ID NO: 3476 - RNA, 20 nt, Artificial Sequence
  Description of Artificial Sequence: Synthetic oligonucleotide
cauccuaggcaagggggaag

SEQ ID NO: 3477 - RNA, 20 nt, Artificial Sequence
  Description of Artificial Sequence: Synthetic oligonucleotide
ccuguaccugcccacucucu

SEQ ID NO: 3478 - RNA, 20 nt, Artificial Sequence
  Description of Artificial Sequence: Synthetic oligonucleotide
gagugggcagguacaggggc

SEQ ID NO: 3479 - RNA, 20 nt, Artificial Sequence
  Description of Artificial Sequence: Synthetic oligonucleotide
aacagcugaggggaggggag

SEQ ID NO: 3480 - RNA, 20 nt, Artificial Sequence
  Description of Artificial Sequence: Synthetic oligonucleotide
aaccugcagguaggggacag

SEQ ID NO: 3481 - RNA, 20 nt, Artificial Sequence
  Description of Artificial Sequence: Synthetic oligonucleotide
guccugcaaacaaaucacag

SEQ ID NO: 3482 - RNA, 20 nt, Artificial Sequence
  Description of Artificial Sequence: Synthetic oligonucleotide
gguuuuccagcucucacgga

SEQ ID NO: 3483 - RNA, 20 nt, Artificial Sequence
  Description of Artificial Sequence: Synthetic oligonucleotide
ugguuuuccagcucucacgg

SEQ ID NO: 3484 - RNA, 20 nt, Artificial Sequence
  Description of Artificial Sequence: Synthetic oligonucleotide
ggagaacagcagccuuugag

SEQ ID NO: 3485 - RNA, 20 nt, Artificial Sequence
  Description of Artificial Sequence: Synthetic oligonucleotide
cugguccaacuuccacucaa

SEQ ID NO: 3486 - RNA, 20 nt, Artificial Sequence
  Description of Artificial Sequence: Synthetic oligonucleotide
cuggcauccaguauuguuuc

SEQ ID NO: 3487 - RNA, 20 nt, Artificial Sequence
  Description of Artificial Sequence: Synthetic oligonucleotide
aaucaaacuauaaagaaaau

SEQ ID NO: 3488 - RNA, 20 nt, Artificial Sequence
  Description of Artificial Sequence: Synthetic oligonucleotide
ucaguuuaccuauuucgagc

SEQ ID NO: 3489 - RNA, 20 nt, Artificial Sequence
  Description of Artificial Sequence: Synthetic oligonucleotide
gugugcaguuaaaagaccug

SEQ ID NO: 3490 - RNA, 20 nt, Artificial Sequence
  Description of Artificial Sequence: Synthetic oligonucleotide
agggcacaagcuauagcaau

SEQ ID NO: 3491 - RNA, 20 nt, Artificial Sequence
  Description of Artificial Sequence: Synthetic oligonucleotide
uacucugaaaggaugaagac

SEQ ID NO: 3492 - RNA, 20 nt, Artificial Sequence
  Description of Artificial Sequence: Synthetic oligonucleotide
acagaacagauagcugaaga

SEQ ID NO: 3493 - RNA, 20 nt, Artificial Sequence
  Description of Artificial Sequence: Synthetic oligonucleotide
aaucuuuuaguguugggaag

SEQ ID NO: 3494 - RNA, 20 nt, Artificial Sequence
  Description of Artificial Sequence: Synthetic oligonucleotide
gaaucuuuuaguguugggaa

SEQ ID NO: 3495 - RNA, 20 nt, Artificial Sequence
  Description of Artificial Sequence: Synthetic oligonucleotide
agaaucuuuuaguguuggga

SEQ ID NO: 3496 - RNA, 20 nt, Artificial Sequence
  Description of Artificial Sequence: Synthetic oligonucleotide
cuccuaccuuuuuggucagc

SEQ ID NO: 3497 - RNA, 20 nt, Artificial Sequence
  Description of Artificial Sequence: Synthetic oligonucleotide
uccuaccuuuuuggucagca

SEQ ID NO: 3498 - RNA, 20 nt, Artificial Sequence
  Description of Artificial Sequence: Synthetic oligonucleotide
gccuuacagcaaccucucca

SEQ ID NO: 3499 - RNA, 20 nt, Artificial Sequence
  Description of Artificial Sequence: Synthetic oligonucleotide
auucuuaccugaagcacaau

SEQ ID NO: 3500 - RNA, 20 nt, Artificial Sequence
  Description of Artificial Sequence: Synthetic oligonucleotide
aagcgugucuggggaaaaag

SEQ ID NO: 3501 - RNA, 20 nt, Artificial Sequence
  Description of Artificial Sequence: Synthetic oligonucleotide
gaaucgcuaggguuuggagg

SEQ ID NO: 3502 - RNA, 20 nt, Artificial Sequence
  Description of Artificial Sequence: Synthetic oligonucleotide
cgaaucgcuaggguuuggag

SEQ ID NO: 3503 - RNA, 20 nt, Artificial Sequence
  Description of Artificial Sequence: Synthetic oligonucleotide
acgaaucgcuaggguuugga

SEQ ID NO: 3504 - RNA, 20 nt, Artificial Sequence
  Description of Artificial Sequence: Synthetic oligonucleotide
aacaccuacuggauuguuac

SEQ ID NO: 3505 - RNA, 20 nt, Artificial Sequence
  Description of Artificial Sequence: Synthetic oligonucleotide
uggcauccagaacaaggagg

SEQ ID NO: 3506 - RNA, 20 nt, Artificial Sequence
  Description of Artificial Sequence: Synthetic oligonucleotide
cauccagaacaaggaggcgg

SEQ ID NO: 3507 - RNA, 20 nt, Artificial Sequence
  Description of Artificial Sequence: Synthetic oligonucleotide
cgcuacugcaggagaucuac

SEQ ID NO: 3508 - RNA, 20 nt, Artificial Sequence
  Description of Artificial Sequence: Synthetic oligonucleotide
ggugcagaucaucaagaaga

SEQ ID NO: 3509 - RNA, 20 nt, Artificial Sequence
  Description of Artificial Sequence: Synthetic oligonucleotide
ccaccugcagagcaaccacc

SEQ ID NO: 3510 - RNA, 20 nt, Artificial Sequence
  Description of Artificial Sequence: Synthetic oligonucleotide
ucaccuguguagcugcugga

SEQ ID NO: 3511 - RNA, 20 nt, Artificial Sequence
  Description of Artificial Sequence: Synthetic oligonucleotide
cuccucaccuguguagcugc

SEQ ID NO: 3512 - RNA, 20 nt, Artificial Sequence
  Description of Artificial Sequence: Synthetic oligonucleotide
gccacaggaggaagccccug

SEQ ID NO: 3513 - RNA, 20 nt, Artificial Sequence
  Description of Artificial Sequence: Synthetic oligonucleotide
agaggucugcggacacacga

SEQ ID NO: 3514 - RNA, 20 nt, Artificial Sequence
  Description of Artificial Sequence: Synthetic oligonucleotide
caacugcagaugggcuguga

SEQ ID NO: 3515 - RNA, 20 nt, Artificial Sequence
  Description of Artificial Sequence: Synthetic oligonucleotide
aacugcagaugggcugugac

SEQ ID NO: 3516 - RNA, 20 nt, Artificial Sequence
  Description of Artificial Sequence: Synthetic oligonucleotide
agcccugaagcaccaagaac

SEQ ID NO: 3517 - RNA, 20 nt, Artificial Sequence
  Description of Artificial Sequence: Synthetic oligonucleotide
cuuccagaagugccuggcac

SEQ ID NO: 3518 - RNA, 20 nt, Artificial Sequence
  Description of Artificial Sequence: Synthetic oligonucleotide
ggauagcugcacagggaagg

SEQ ID NO: 3519 - RNA, 20 nt, Artificial Sequence
  Description of Artificial Sequence: Synthetic oligonucleotide
cggauagcugcacagggaag

SEQ ID NO: 3520 - RNA, 20 nt, Artificial Sequence
  Description of Artificial Sequence: Synthetic oligonucleotide
acggauagcugcacagggaa

SEQ ID NO: 3521 - RNA, 20 nt, Artificial Sequence
  Description of Artificial Sequence: Synthetic oligonucleotide
aacacucaccgccguguggc

SEQ ID NO: 3522 - RNA, 20 nt, Artificial Sequence
  Description of Artificial Sequence: Synthetic oligonucleotide
cucaccuccacacagaauga

SEQ ID NO: 3523 - RNA, 20 nt, Artificial Sequence
  Description of Artificial Sequence: Synthetic oligonucleotide
guggcaggcagagaaggggc

SEQ ID NO: 3524 - RNA, 20 nt, Artificial Sequence
  Description of Artificial Sequence: Synthetic oligonucleotide
ggccggucuguggggacaca

SEQ ID NO: 3525 - RNA, 20 nt, Artificial Sequence
  Description of Artificial Sequence: Synthetic oligonucleotide
uggccggucuguggggacac

SEQ ID NO: 3526 - RNA, 20 nt, Artificial Sequence
  Description of Artificial Sequence: Synthetic oligonucleotide
cagcuuggggaagagguacu

SEQ ID NO: 3527 - RNA, 20 nt, Artificial Sequence
  Description of Artificial Sequence: Synthetic oligonucleotide
gcagcuuggggaagagguac

SEQ ID NO: 3528 - RNA, 20 nt, Artificial Sequence
  Description of Artificial Sequence: Synthetic oligonucleotide
ucugcuccaggagaucuaca

SEQ ID NO: 3529 - RNA, 20 nt, Artificial Sequence
  Description of Artificial Sequence: Synthetic oligonucleotide
ggucauggccgccagacccu

SEQ ID NO: 3530 - RNA, 20 nt, Artificial Sequence
  Description of Artificial Sequence: Synthetic oligonucleotide
guccagugucccagaaugcc

SEQ ID NO: 3531 - RNA, 20 nt, Artificial Sequence
  Description of Artificial Sequence: Synthetic oligonucleotide
aaucaccucugaacaauccc

SEQ ID NO: 3532 - RNA, 20 nt, Artificial Sequence
  Description of Artificial Sequence: Synthetic oligonucleotide
cagccuggaagagaaaggaa

SEQ ID NO: 3533 - RNA, 20 nt, Artificial Sequence
  Description of Artificial Sequence: Synthetic oligonucleotide
gcuuaccucuucacuguugg

SEQ ID NO: 3534 - RNA, 20 nt, Artificial Sequence
  Description of Artificial Sequence: Synthetic oligonucleotide
gaggcuuaccucuucacugu

SEQ ID NO: 3535 - RNA, 20 nt, Artificial Sequence
  Description of Artificial Sequence: Synthetic oligonucleotide
uugugcugaaauaaagaaaa

SEQ ID NO: 3536 - RNA, 20 nt, Artificial Sequence
  Description of Artificial Sequence: Synthetic oligonucleotide
ugugcugaaauaaagaaaaa

SEQ ID NO: 3537 - RNA, 20 nt, Artificial Sequence
  Description of Artificial Sequence: Synthetic oligonucleotide
gugcugaaauaaagaaaaag

SEQ ID NO: 3538 - RNA, 20 nt, Artificial Sequence
  Description of Artificial Sequence: Synthetic oligonucleotide
cuaccuucagauuggagagc

SEQ ID NO: 3539 - RNA, 20 nt, Artificial Sequence
  Description of Artificial Sequence: Synthetic oligonucleotide
cugcgcaccuggcauucaug

SEQ ID NO: 3540 - RNA, 20 nt, Artificial Sequence
  Description of Artificial Sequence: Synthetic oligonucleotide
uugcaaagaaacauggggaa

SEQ ID NO: 3541 - RNA, 20 nt, Artificial Sequence
  Description of Artificial Sequence: Synthetic oligonucleotide
ugaccgacauuccauggcca

SEQ ID NO: 3542 - RNA, 20 nt, Artificial Sequence
  Description of Artificial Sequence: Synthetic oligonucleotide
uuucacugaaagggagagag

SEQ ID NO: 3543 - RNA, 20 nt, Artificial Sequence
  Description of Artificial Sequence: Synthetic oligonucleotide
cuuucacugaaagggagaga

SEQ ID NO: 3544 - RNA, 20 nt, Artificial Sequence
  Description of Artificial Sequence: Synthetic oligonucleotide
ucuuucacugaaagggagag

SEQ ID NO: 3545 - RNA, 20 nt, Artificial Sequence
  Description of Artificial Sequence: Synthetic oligonucleotide
uguucugugggcagaggggu

SEQ ID NO: 3546 - RNA, 20 nt, Artificial Sequence
  Description of Artificial Sequence: Synthetic oligonucleotide
gcuguguucugugggcagag

SEQ ID NO: 3547 - RNA, 20 nt, Artificial Sequence
  Description of Artificial Sequence: Synthetic oligonucleotide
accucaccuucuguuugucg

SEQ ID NO: 3548 - RNA, 20 nt, Artificial Sequence
  Description of Artificial Sequence: Synthetic oligonucleotide
ccaccugggaagggaaggag

SEQ ID NO: 3549 - RNA, 20 nt, Artificial Sequence
  Description of Artificial Sequence: Synthetic oligonucleotide
accaccugggaagggaagga

SEQ ID NO: 3550 - RNA, 20 nt, Artificial Sequence
  Description of Artificial Sequence: Synthetic oligonucleotide
caccaccugggaagggaagg

SEQ ID NO: 3551 - RNA, 20 nt, Artificial Sequence
  Description of Artificial Sequence: Synthetic oligonucleotide
guccugugggaagcaguggc

SEQ ID NO: 3552 - RNA, 20 nt, Artificial Sequence
  Description of Artificial Sequence: Synthetic oligonucleotide
aguuguccugugggaagcag

SEQ ID NO: 3553 - RNA, 20 nt, Artificial Sequence
  Description of Artificial Sequence: Synthetic oligonucleotide
cucacugauggggacaaaug

SEQ ID NO: 3554 - RNA, 20 nt, Artificial Sequence
  Description of Artificial Sequence: Synthetic oligonucleotide
gcucacugauggggacaaau

SEQ ID NO: 3555 - RNA, 20 nt, Artificial Sequence
  Description of Artificial Sequence: Synthetic oligonucleotide
ggcucacugauggggacaaa

SEQ ID NO: 3556 - RNA, 20 nt, Artificial Sequence
  Description of Artificial Sequence: Synthetic oligonucleotide
gcaccugaauguagcccugc

SEQ ID NO: 3557 - RNA, 20 nt, Artificial Sequence
  Description of Artificial Sequence: Synthetic oligonucleotide
ucaccugugggcacaagaac

SEQ ID NO: 3558 - RNA, 20 nt, Artificial Sequence
  Description of Artificial Sequence: Synthetic oligonucleotide
agcccuggagcaagaugggg

SEQ ID NO: 3559 - RNA, 20 nt, Artificial Sequence
  Description of Artificial Sequence: Synthetic oligonucleotide
uagcccuggagcaagauggg

SEQ ID NO: 3560 - RNA, 20 nt, Artificial Sequence
  Description of Artificial Sequence: Synthetic oligonucleotide
guagcccuggagcaagaugg

SEQ ID NO: 3561 - RNA, 20 nt, Artificial Sequence
  Description of Artificial Sequence: Synthetic oligonucleotide
uguagcccuggagcaagaug

SEQ ID NO: 3562 - RNA, 20 nt, Artificial Sequence
  Description of Artificial Sequence: Synthetic oligonucleotide
uuguagcccuggagcaagau

SEQ ID NO: 3563 - RNA, 20 nt, Artificial Sequence
  Description of Artificial Sequence: Synthetic oligonucleotide
caccuggaggaagggguaca

SEQ ID NO: 3564 - RNA, 20 nt, Artificial Sequence
  Description of Artificial Sequence: Synthetic oligonucleotide
gcccaccuuccucugguaga

SEQ ID NO: 3565 - DNA, 20 bp, Artificial Sequence
  Description of Artificial Sequence: Synthetic oligonucleotide
ggagcgggggggagaagcgg

SEQ ID NO: 3566 - RNA, 20 nt, Artificial Sequence
  Description of Artificial Sequence: Synthetic oligonucleotide
aaacaaaaggagauaucaag

SEQ ID NO: 3567 - RNA, 20 nt, Artificial Sequence
  Description of Artificial Sequence: Synthetic oligonucleotide
auaucugaguacuuuaguua

SEQ ID NO: 3568 - RNA, 20 nt, Artificial Sequence
  Description of Artificial Sequence: Synthetic oligonucleotide
ccuaccucugcaauuaaauu

SEQ ID NO: 3569 - RNA, 20 nt, Artificial Sequence
  Description of Artificial Sequence: Synthetic oligonucleotide
auaacuuaccuuuuugucuc

SEQ ID NO: 3570 - RNA, 20 nt, Artificial Sequence
  Description of Artificial Sequence: Synthetic oligonucleotide
ucgcuggcagccgcuguacu

SEQ ID NO: 3571 - RNA, 20 nt, Artificial Sequence
  Description of Artificial Sequence: Synthetic oligonucleotide
acucuaaaaagugaaaauca

SEQ ID NO: 3572 - RNA, 20 nt, Artificial Sequence
  Description of Artificial Sequence: Synthetic oligonucleotide
aggugcagcagaugaaacag

SEQ ID NO: 3573 - RNA, 20 nt, Artificial Sequence
  Description of Artificial Sequence: Synthetic oligonucleotide
accaccugggcggcccaggc

SEQ ID NO: 3574 - RNA, 20 nt, Artificial Sequence
  Description of Artificial Sequence: Synthetic oligonucleotide
ccaccugggcggcccaggca

SEQ ID NO: 3575 - RNA, 20 nt, Artificial Sequence
  Description of Artificial Sequence: Synthetic oligonucleotide
cccccacccugcagggcacc

SEQ ID NO: 3576 - RNA, 20 nt, Artificial Sequence
  Description of Artificial Sequence: Synthetic oligonucleotide
ccacccugcagggcaccagg

SEQ ID NO: 3577 - RNA, 20 nt, Artificial Sequence
  Description of Artificial Sequence: Synthetic oligonucleotide
agcccucaccucucacuagu

SEQ ID NO: 3578 - RNA, 20 nt, Artificial Sequence
  Description of Artificial Sequence: Synthetic oligonucleotide
caccuagagaaggcagcguc

SEQ ID NO: 3579 - RNA, 20 nt, Artificial Sequence
  Description of Artificial Sequence: Synthetic oligonucleotide
acccuggggggagccaaauu

SEQ ID NO: 3580 - RNA, 20 nt, Artificial Sequence
  Description of Artificial Sequence: Synthetic oligonucleotide
caaacucugagaugugggug

SEQ ID NO: 3581 - RNA, 20 nt, Artificial Sequence
  Description of Artificial Sequence: Synthetic oligonucleotide
gcaaacucugagaugugggu

SEQ ID NO: 3582 - RNA, 20 nt, Artificial Sequence
  Description of Artificial Sequence: Synthetic oligonucleotide
ucaacugggagugggcggag

SEQ ID NO: 3583 - RNA, 20 nt, Artificial Sequence
  Description of Artificial Sequence: Synthetic oligonucleotide
acugcugaccuugauguagu

SEQ ID NO: 3584 - RNA, 20 nt, Artificial Sequence
  Description of Artificial Sequence: Synthetic oligonucleotide
gcugguucuggacgcaagcg

SEQ ID NO: 3585 - RNA, 20 nt, Artificial Sequence
  Description of Artificial Sequence: Synthetic oligonucleotide
uuguucuggaaagggagggu

SEQ ID NO: 3586 - RNA, 20 nt, Artificial Sequence
  Description of Artificial Sequence: Synthetic oligonucleotide
uguucuggaaagggaggguc

SEQ ID NO: 3587 - RNA, 20 nt, Artificial Sequence
  Description of Artificial Sequence: Synthetic oligonucleotide
gccacucacauuguccagcg

SEQ ID NO: 3588 - RNA, 20 nt, Artificial Sequence
  Description of Artificial Sequence: Synthetic oligonucleotide
cucccuaagccgaggacaua

SEQ ID NO: 3589 - RNA, 20 nt, Artificial Sequence
  Description of Artificial Sequence: Synthetic oligonucleotide
ucucccuaagccgaggacau

SEQ ID NO: 3590 - RNA, 20 nt, Artificial Sequence
  Description of Artificial Sequence: Synthetic oligonucleotide
ucaccugcagugcacgauga

SEQ ID NO: 3591 - RNA, 20 nt, Artificial Sequence
  Description of Artificial Sequence: Synthetic oligonucleotide
ccggcgcuggggaaagacgg

SEQ ID NO: 3592 - RNA, 20 nt, Artificial Sequence
  Description of Artificial Sequence: Synthetic oligonucleotide
gccggcgcuggggaaagacg

SEQ ID NO: 3593 - RNA, 20 nt, Artificial Sequence
  Description of Artificial Sequence: Synthetic oligonucleotide
ugccggcgcuggggaaagac

SEQ ID NO: 3594 - RNA, 20 nt, Artificial Sequence
  Description of Artificial Sequence: Synthetic oligonucleotide
cacucacuuggacgaggugc

SEQ ID NO: 3595 - RNA, 20 nt, Artificial Sequence
  Description of Artificial Sequence: Synthetic oligonucleotide
ccacucacuuggacgaggug

SEQ ID NO: 3596 - RNA, 20 nt, Artificial Sequence
  Description of Artificial Sequence: Synthetic oligonucleotide
ugucugcagccgggugcagg

SEQ ID NO: 3597 - RNA, 20 nt, Artificial Sequence
  Description of Artificial Sequence: Synthetic oligonucleotide
gugucugcagccgggugcag

SEQ ID NO: 3598 - RNA, 20 nt, Artificial Sequence
  Description of Artificial Sequence: Synthetic oligonucleotide
ugugucugcagccgggugca

SEQ ID NO: 3599 - RNA, 20 nt, Artificial Sequence
  Description of Artificial Sequence: Synthetic oligonucleotide
caccgcucacuuccucuuga

SEQ ID NO: 3600 - RNA, 20 nt, Artificial Sequence
  Description of Artificial Sequence: Synthetic oligonucleotide
gcaccgcucacuuccucuug

SEQ ID NO: 3601 - RNA, 20 nt, Artificial Sequence
  Description of Artificial Sequence: Synthetic oligonucleotide
uuucuucuaaaauaguccau

SEQ ID NO: 3602 - RNA, 20 nt, Artificial Sequence
  Description of Artificial Sequence: Synthetic oligonucleotide
guuacugaccuuucagaggu

SEQ ID NO: 3603 - RNA, 20 nt, Artificial Sequence
  Description of Artificial Sequence: Synthetic oligonucleotide
acuacuuacucugcacaggg

SEQ ID NO: 3604 - RNA, 20 nt, Artificial Sequence
  Description of Artificial Sequence: Synthetic oligonucleotide
gaccuaaaauauaaaaaauu

SEQ ID NO: 3605 - RNA, 20 nt, Artificial Sequence
  Description of Artificial Sequence: Synthetic oligonucleotide
auuuaccugaaccucugaau

SEQ ID NO: 3606 - RNA, 20 nt, Artificial Sequence
  Description of Artificial Sequence: Synthetic oligonucleotide
cuuacuguacaacaagcugc

SEQ ID NO: 3607 - RNA, 20 nt, Artificial Sequence
  Description of Artificial Sequence: Synthetic oligonucleotide
cgauccugaaaauugaaaac

SEQ ID NO: 3608 - RNA, 20 nt, Artificial Sequence
  Description of Artificial Sequence: Synthetic oligonucleotide
cccuuaccaggcuugaugag

SEQ ID NO: 3609 - RNA, 20 nt, Artificial Sequence
  Description of Artificial Sequence: Synthetic oligonucleotide
gauauuggcuaaauacagaa

SEQ ID NO: 3610 - RNA, 20 nt, Artificial Sequence
  Description of Artificial Sequence: Synthetic oligonucleotide
uucuguaccucaucaagaau

SEQ ID NO: 3611 - RNA, 20 nt, Artificial Sequence
  Description of Artificial Sequence: Synthetic oligonucleotide
uucuccugcaggauuuaaaa

SEQ ID NO: 3612 - RNA, 20 nt, Artificial Sequence
  Description of Artificial Sequence: Synthetic oligonucleotide
ggucaucugcaggaaaaaaa

SEQ ID NO: 3613 - RNA, 20 nt, Artificial Sequence
  Description of Artificial Sequence: Synthetic oligonucleotide
caagaacuaaauggggaaau

SEQ ID NO: 3614 - RNA, 20 nt, Artificial Sequence
  Description of Artificial Sequence: Synthetic oligonucleotide
ggcgagccugagggcggggc

SEQ ID NO: 3615 - RNA, 20 nt, Artificial Sequence
  Description of Artificial Sequence: Synthetic oligonucleotide
uggcgagccugagggcgggg

SEQ ID NO: 3616 - RNA, 20 nt, Artificial Sequence
  Description of Artificial Sequence: Synthetic oligonucleotide
ccucgccugucacgugcagc

SEQ ID NO: 3617 - RNA, 20 nt, Artificial Sequence
  Description of Artificial Sequence: Synthetic oligonucleotide
gcgcgccagauggccgucag

SEQ ID NO: 3618 - RNA, 20 nt, Artificial Sequence
  Description of Artificial Sequence: Synthetic oligonucleotide
ugcauggaccagcgcugcgc

SEQ ID NO: 3619 - RNA, 20 nt, Artificial Sequence
  Description of Artificial Sequence: Synthetic oligonucleotide
guccaugcaggugccacccg

SEQ ID NO: 3620 - RNA, 20 nt, Artificial Sequence
  Description of Artificial Sequence: Synthetic oligonucleotide
agcgcagcgcugguccaugc

SEQ ID NO: 3621 - RNA, 20 nt, Artificial Sequence
  Description of Artificial Sequence: Synthetic oligonucleotide
cgcacccaccugggcggcgg

SEQ ID NO: 3622 - RNA, 20 nt, Artificial Sequence
  Description of Artificial Sequence: Synthetic oligonucleotide
cgcggcugcaggggagaagg

SEQ ID NO: 3623 - RNA, 20 nt, Artificial Sequence
  Description of Artificial Sequence: Synthetic oligonucleotide
gcacccaccugggcggcggc

SEQ ID NO: 3624 - RNA, 20 nt, Artificial Sequence
  Description of Artificial Sequence: Synthetic oligonucleotide
cggcgcggcugcaggggaga

SEQ ID NO: 3625 - RNA, 20 nt, Artificial Sequence
  Description of Artificial Sequence: Synthetic oligonucleotide
gcggcugcaggggagaaggc

SEQ ID NO: 3626 - DNA, 20 bp, Artificial Sequence
  Description of Artificial Sequence: Synthetic oligonucleotide
gggccggaccaggcgagggc

SEQ ID NO: 3627 - DNA, 20 bp, Artificial Sequence
  Description of Artificial Sequence: Synthetic oligonucleotide
ccggaccaggcgagggcggg

SEQ ID NO: 3628 - RNA, 20 nt, Artificial Sequence
  Description of Artificial Sequence: Synthetic oligonucleotide
auuugagccagaugaacccc

SEQ ID NO: 3629 - RNA, 20 nt, Artificial Sequence
  Description of Artificial Sequence: Synthetic oligonucleotide
uuacccuccggguugggcag

SEQ ID NO: 3630 - RNA, 20 nt, Artificial Sequence
  Description of Artificial Sequence: Synthetic oligonucleotide
cuuacccuccggguugggca

SEQ ID NO: 3631 - RNA, 20 nt, Artificial Sequence
  Description of Artificial Sequence: Synthetic oligonucleotide
guccuggggaaacaaaggca

SEQ ID NO: 3632 - RNA, 20 nt, Artificial Sequence
  Description of Artificial Sequence: Synthetic oligonucleotide
auccaguccuggggaaacaa

SEQ ID NO: 3633 - RNA, 20 nt, Artificial Sequence
  Description of Artificial Sequence: Synthetic oligonucleotide
uacucacccaugguaaacuc

SEQ ID NO: 3634 - RNA, 20 nt, Artificial Sequence
  Description of Artificial Sequence: Synthetic oligonucleotide
uaaaacccugcaggaggugg

SEQ ID NO: 3635 - RNA, 20 nt, Artificial Sequence
  Description of Artificial Sequence: Synthetic oligonucleotide
agucugugggccagaagaaa

SEQ ID NO: 3636 - RNA, 20 nt, Artificial Sequence
  Description of Artificial Sequence: Synthetic oligonucleotide
acucaccugugagcugccaa

SEQ ID NO: 3637 - RNA, 20 nt, Artificial Sequence
  Description of Artificial Sequence: Synthetic oligonucleotide
gcugccaaaggauauagaug

SEQ ID NO: 3638 - RNA, 20 nt, Artificial Sequence
  Description of Artificial Sequence: Synthetic oligonucleotide
cugccaaaggauauagauga

SEQ ID NO: 3639 - RNA, 20 nt, Artificial Sequence
  Description of Artificial Sequence: Synthetic oligonucleotide
gucaccuucacagagcuucc

SEQ ID NO: 3640 - RNA, 20 nt, Artificial Sequence
  Description of Artificial Sequence: Synthetic oligonucleotide
cagcaccuucagagaauggg

SEQ ID NO: 3641 - RNA, 20 nt, Artificial Sequence
  Description of Artificial Sequence: Synthetic oligonucleotide
caccuucagagaaugggugg

SEQ ID NO: 3642 - RNA, 20 nt, Artificial Sequence
  Description of Artificial Sequence: Synthetic oligonucleotide
auguacucuaaaagcaaguu

SEQ ID NO: 3643 - RNA, 20 nt, Artificial Sequence
  Description of Artificial Sequence: Synthetic oligonucleotide
aauguacucuaaaagcaagu

SEQ ID NO: 3644 - RNA, 20 nt, Artificial Sequence
  Description of Artificial Sequence: Synthetic oligonucleotide
cgcugcgccagcgccgcgug

SEQ ID NO: 3645 - RNA, 20 nt, Artificial Sequence
  Description of Artificial Sequence: Synthetic oligonucleotide
gggcccccaguagaauccgc

SEQ ID NO: 3646 - RNA, 20 nt, Artificial Sequence
  Description of Artificial Sequence: Synthetic oligonucleotide
cuuaccuaccucccaauguc

SEQ ID NO: 3647 - RNA, 20 nt, Artificial Sequence
  Description of Artificial Sequence: Synthetic oligonucleotide
cugcaucuacaguaaucuga

SEQ ID NO: 3648 - RNA, 20 nt, Artificial Sequence
  Description of Artificial Sequence: Synthetic oligonucleotide
augguauccuaaaauagaaa

SEQ ID NO: 3649 - RNA, 20 nt, Artificial Sequence
  Description of Artificial Sequence: Synthetic oligonucleotide
ucauaccugcaggagcugag

SEQ ID NO: 3650 - RNA, 20 nt, Artificial Sequence
  Description of Artificial Sequence: Synthetic oligonucleotide
uaagcuagaagagaagugga

SEQ ID NO: 3651 - RNA, 20 nt, Artificial Sequence
  Description of Artificial Sequence: Synthetic oligonucleotide
cucuuaagcuagaagagaag

SEQ ID NO: 3652 - RNA, 20 nt, Artificial Sequence
  Description of Artificial Sequence: Synthetic oligonucleotide
gcugcagccuggaucaagcg

SEQ ID NO: 3653 - RNA, 20 nt, Artificial Sequence
  Description of Artificial Sequence: Synthetic oligonucleotide
gcugcaggaccugugccgcc

SEQ ID NO: 3654 - RNA, 20 nt, Artificial Sequence
  Description of Artificial Sequence: Synthetic oligonucleotide
uuccuguuggggguggguag

SEQ ID NO: 3655 - RNA, 20 nt, Artificial Sequence
  Description of Artificial Sequence: Synthetic oligonucleotide
guuccuguugggggugggua

SEQ ID NO: 3656 - RNA, 20 nt, Artificial Sequence
  Description of Artificial Sequence: Synthetic oligonucleotide
uguuccuguugggggugggu

SEQ ID NO: 3657 - RNA, 20 nt, Artificial Sequence
  Description of Artificial Sequence: Synthetic oligonucleotide
acaggaacaggaauauuacc

SEQ ID NO: 3658 - RNA, 20 nt, Artificial Sequence
  Description of Artificial Sequence: Synthetic oligonucleotide
gauauccacgccauuucacc

SEQ ID NO: 3659 - RNA, 20 nt, Artificial Sequence
  Description of Artificial Sequence: Synthetic oligonucleotide
acucacgugagcaccgggau

SEQ ID NO: 3660 - RNA, 20 nt, Artificial Sequence
  Description of Artificial Sequence: Synthetic oligonucleotide
gacucacgugagcaccggga

SEQ ID NO: 3661 - RNA, 20 nt, Artificial Sequence
  Description of Artificial Sequence: Synthetic oligonucleotide
caccugugaggaaaaggacg

SEQ ID NO: 3662 - RNA, 20 nt, Artificial Sequence
  Description of Artificial Sequence: Synthetic oligonucleotide
ccaccugugaggaaaaggac

SEQ ID NO: 3663 - RNA, 20 nt, Artificial Sequence
  Description of Artificial Sequence: Synthetic oligonucleotide
gacucacugagacaaaguag

SEQ ID NO: 3664 - RNA, 20 nt, Artificial Sequence
  Description of Artificial Sequence: Synthetic oligonucleotide
accaccugugaggaaaagga

SEQ ID NO: 3665 - RNA, 20 nt, Artificial Sequence
  Description of Artificial Sequence: Synthetic oligonucleotide
ggacucacugagacaaagua

SEQ ID NO: 3666 - RNA, 20 nt, Artificial Sequence
  Description of Artificial Sequence: Synthetic oligonucleotide
gggacucacugagacaaagu

SEQ ID NO: 3667 - RNA, 20 nt, Artificial Sequence
  Description of Artificial Sequence: Synthetic oligonucleotide
uuacuuggcaggcuuuccaa

SEQ ID NO: 3668 - RNA, 20 nt, Artificial Sequence
  Description of Artificial Sequence: Synthetic oligonucleotide
caguaccuggggggagagaa

SEQ ID NO: 3669 - RNA, 20 nt, Artificial Sequence
  Description of Artificial Sequence: Synthetic oligonucleotide
ccaguaccuggggggagaga

SEQ ID NO: 3670 - RNA, 20 nt, Artificial Sequence
  Description of Artificial Sequence: Synthetic oligonucleotide
uugugcuggaggcaccagaa

SEQ ID NO: 3671 - RNA, 20 nt, Artificial Sequence
  Description of Artificial Sequence: Synthetic oligonucleotide
auugugcuggaggcaccaga

SEQ ID NO: 3672 - RNA, 20 nt, Artificial Sequence
  Description of Artificial Sequence: Synthetic oligonucleotide
cccaacgcugacagagagaa

SEQ ID NO: 3673 - RNA, 20 nt, Artificial Sequence
  Description of Artificial Sequence: Synthetic oligonucleotide
gucaccugaggacagaaagg

SEQ ID NO: 3674 - RNA, 20 nt, Artificial Sequence
  Description of Artificial Sequence: Synthetic oligonucleotide
gccgucaccugaggacagaa

SEQ ID NO: 3675 - RNA, 20 nt, Artificial Sequence
  Description of Artificial Sequence: Synthetic oligonucleotide
uuccaguucuaaggggagcg

SEQ ID NO: 3676 - RNA, 20 nt, Artificial Sequence
  Description of Artificial Sequence: Synthetic oligonucleotide
ucaccugaaaugacaaugau

SEQ ID NO: 3677 - RNA, 20 nt, Artificial Sequence
  Description of Artificial Sequence: Synthetic oligonucleotide
cauccaaccugaagaccaaa

SEQ ID NO: 3678 - RNA, 20 nt, Artificial Sequence
  Description of Artificial Sequence: Synthetic oligonucleotide
gaucucugaguggaaagaac

SEQ ID NO: 3679 - RNA, 20 nt, Artificial Sequence
  Description of Artificial Sequence: Synthetic oligonucleotide
aggacgcgcauccccggggc

SEQ ID NO: 3680 - RNA, 20 nt, Artificial Sequence
  Description of Artificial Sequence: Synthetic oligonucleotide
ucccacagguaagcggguga

SEQ ID NO: 3681 - RNA, 20 nt, Artificial Sequence
  Description of Artificial Sequence: Synthetic oligonucleotide
ggcgcuacgagccuucccac

SEQ ID NO: 3682 - RNA, 20 nt, Artificial Sequence
  Description of Artificial Sequence: Synthetic oligonucleotide
cccacucacccauggggcag

SEQ ID NO: 3683 - RNA, 20 nt, Artificial Sequence
  Description of Artificial Sequence: Synthetic oligonucleotide
cgacacagcagugcccacag

SEQ ID NO: 3684 - RNA, 20 nt, Artificial Sequence
  Description of Artificial Sequence: Synthetic oligonucleotide
gucgucuaagggacacagac

SEQ ID NO: 3685 - RNA, 20 nt, Artificial Sequence
  Description of Artificial Sequence: Synthetic oligonucleotide
ucgucuaagggacacagaca

SEQ ID NO: 3686 - RNA, 20 nt, Artificial Sequence
  Description of Artificial Sequence: Synthetic oligonucleotide
cgucuaagggacacagacag

SEQ ID NO: 3687 - DNA, 20 bp, Artificial Sequence
  Description of Artificial Sequence: Synthetic oligonucleotide
cccccaggccaagcccaccc

SEQ ID NO: 3688 - RNA, 20 nt, Artificial Sequence
  Description of Artificial Sequence: Synthetic oligonucleotide
aaauuaccuggaucugaacu

SEQ ID NO: 3689 - RNA, 20 nt, Artificial Sequence
  Description of Artificial Sequence: Synthetic oligonucleotide
ucaucuaagggacacagaug

SEQ ID NO: 3690 - RNA, 20 nt, Artificial Sequence
  Description of Artificial Sequence: Synthetic oligonucleotide
gugcugcggggagaagccca

SEQ ID NO: 3691 - RNA, 20 nt, Artificial Sequence
  Description of Artificial Sequence: Synthetic oligonucleotide
accauuaccugcauccagaa

SEQ ID NO: 3692 - RNA, 20 nt, Artificial Sequence
  Description of Artificial Sequence: Synthetic oligonucleotide
ccauuaccugcauccagaac

SEQ ID NO: 3693 - RNA, 20 nt, Artificial Sequence
  Description of Artificial Sequence: Synthetic oligonucleotide
ccccacucagagcuugcugg

SEQ ID NO: 3694 - RNA, 20 nt, Artificial Sequence
  Description of Artificial Sequence: Synthetic oligonucleotide
acccagaagagcacuggccc

SEQ ID NO: 3695 - RNA, 20 nt, Artificial Sequence
  Description of Artificial Sequence: Synthetic oligonucleotide
aggaucacccagaagagcac

SEQ ID NO: 3696 - RNA, 20 nt, Artificial Sequence
  Description of Artificial Sequence: Synthetic oligonucleotide
uggagcucugaaacgacacc

SEQ ID NO: 3697 - RNA, 20 nt, Artificial Sequence
  Description of Artificial Sequence: Synthetic oligonucleotide
agcucugaaacgacaccagg

SEQ ID NO: 3698 - RNA, 20 nt, Artificial Sequence
  Description of Artificial Sequence: Synthetic oligonucleotide
cucacccacaagcucuagcu

SEQ ID NO: 3699 - RNA, 20 nt, Artificial Sequence
  Description of Artificial Sequence: Synthetic oligonucleotide
ucacccacaagcucuagcuu

SEQ ID NO: 3700 - RNA, 20 nt, Artificial Sequence
  Description of Artificial Sequence: Synthetic oligonucleotide
acuuaccguugagcuccucc

SEQ ID NO: 3701 - RNA, 20 nt, Artificial Sequence
  Description of Artificial Sequence: Synthetic oligonucleotide
cuuaccguugagcuccuccu

SEQ ID NO: 3702 - RNA, 20 nt, Artificial Sequence
  Description of Artificial Sequence: Synthetic oligonucleotide
agcugcugugggacgggaau

SEQ ID NO: 3703 - RNA, 20 nt, Artificial Sequence
  Description of Artificial Sequence: Synthetic oligonucleotide
cagcugcugugggacgggaa

SEQ ID NO: 3704 - RNA, 20 nt, Artificial Sequence
  Description of Artificial Sequence: Synthetic oligonucleotide
cuccucagcugcugugggac

SEQ ID NO: 3705 - RNA, 20 nt, Artificial Sequence
  Description of Artificial Sequence: Synthetic oligonucleotide
gccgcugcaggaugccagcc

SEQ ID NO: 3706 - RNA, 20 nt, Artificial Sequence
  Description of Artificial Sequence: Synthetic oligonucleotide
ugacucaccaaucuuguuau

SEQ ID NO: 3707 - RNA, 20 nt, Artificial Sequence
  Description of Artificial Sequence: Synthetic oligonucleotide
ucucugcaaggcaaaaggau

SEQ ID NO: 3708 - RNA, 20 nt, Artificial Sequence
  Description of Artificial Sequence: Synthetic oligonucleotide
uucucugcaaggcaaaagga

SEQ ID NO: 3709 - RNA, 20 nt, Artificial Sequence
  Description of Artificial Sequence: Synthetic oligonucleotide
acucaccaacagcaggaccg

SEQ ID NO: 3710 - RNA, 20 nt, Artificial Sequence
  Description of Artificial Sequence: Synthetic oligonucleotide
gagaccuguggggacaaagc

SEQ ID NO: 3711 - RNA, 20 nt, Artificial Sequence
  Description of Artificial Sequence: Synthetic oligonucleotide
cucacccugugcggcacuuc

SEQ ID NO: 3712 - RNA, 20 nt, Artificial Sequence
  Description of Artificial Sequence: Synthetic oligonucleotide
acaccuggguacacacacag

SEQ ID NO: 3713 - RNA, 20 nt, Artificial Sequence
  Description of Artificial Sequence: Synthetic oligonucleotide
ugagcucuggaaaaagacau

SEQ ID NO: 3714 - RNA, 20 nt, Artificial Sequence
  Description of Artificial Sequence: Synthetic oligonucleotide
ccgguuccuguaacacauag

SEQ ID NO: 3715 - RNA, 20 nt, Artificial Sequence
  Description of Artificial Sequence: Synthetic oligonucleotide
cgguuccuguaacacauagu

SEQ ID NO: 3716 - RNA, 20 nt, Artificial Sequence
  Description of Artificial Sequence: Synthetic oligonucleotide
guucaccuuguugcaauagu

SEQ ID NO: 3717 - RNA, 20 nt, Artificial Sequence
  Description of Artificial Sequence: Synthetic oligonucleotide
uucaccuuguugcaauagua

SEQ ID NO: 3718 - RNA, 20 nt, Artificial Sequence
  Description of Artificial Sequence: Synthetic oligonucleotide
ucaccuuguugcaauaguag

SEQ ID NO: 3719 - RNA, 20 nt, Artificial Sequence
  Description of Artificial Sequence: Synthetic oligonucleotide
ucacagcuaagugcucaacu

SEQ ID NO: 3720 - RNA, 20 nt, Artificial Sequence
  Description of Artificial Sequence: Synthetic oligonucleotide
ugauacucaggccgccauca

SEQ ID NO: 3721 - RNA, 20 nt, Artificial Sequence
  Description of Artificial Sequence: Synthetic oligonucleotide
gauacucaggccgccaucaa

SEQ ID NO: 3722 - RNA, 20 nt, Artificial Sequence
  Description of Artificial Sequence: Synthetic oligonucleotide
gagaagagcaaaaacaggua

SEQ ID NO: 3723 - RNA, 20 nt, Artificial Sequence
  Description of Artificial Sequence: Synthetic oligonucleotide
agaagagcaaaaacagguaa

SEQ ID NO: 3724 - RNA, 20 nt, Artificial Sequence
  Description of Artificial Sequence: Synthetic oligonucleotide
cguuaccuuggauacaaggc

SEQ ID NO: 3725 - RNA, 20 nt, Artificial Sequence
  Description of Artificial Sequence: Synthetic oligonucleotide
ucaccaugcagcagccccuu

SEQ ID NO: 3726 - RNA, 20 nt, Artificial Sequence
  Description of Artificial Sequence: Synthetic oligonucleotide
ugggaaccagcuccccaugc

SEQ ID NO: 3727 - RNA, 20 nt, Artificial Sequence
  Description of Artificial Sequence: Synthetic oligonucleotide
caugcagcaaguaagugcaa

SEQ ID NO: 3728 - RNA, 20 nt, Artificial Sequence
  Description of Artificial Sequence: Synthetic oligonucleotide
ugcacuuacuugcugcaugg

SEQ ID NO: 3729 - RNA, 20 nt, Artificial Sequence
  Description of Artificial Sequence: Synthetic oligonucleotide
gcacuuacuugcugcauggu

SEQ ID NO: 3730 - RNA, 20 nt, Artificial Sequence
  Description of Artificial Sequence: Synthetic oligonucleotide
agcugcacaaguugucaccc

SEQ ID NO: 3731 - RNA, 20 nt, Artificial Sequence
  Description of Artificial Sequence: Synthetic oligonucleotide
cucccccacaaccgguggac

SEQ ID NO: 3732 - RNA, 20 nt, Artificial Sequence
  Description of Artificial Sequence: Synthetic oligonucleotide
uuauuccaguccaccgguug

SEQ ID NO: 3733 - RNA, 20 nt, Artificial Sequence
  Description of Artificial Sequence: Synthetic oligonucleotide
uauuccaguccaccgguugu

SEQ ID NO: 3734 - RNA, 20 nt, Artificial Sequence
  Description of Artificial Sequence: Synthetic oligonucleotide
auuccaguccaccgguugug

SEQ ID NO: 3735 - RNA, 20 nt, Artificial Sequence
  Description of Artificial Sequence: Synthetic oligonucleotide
uuccaguccaccgguugugg

SEQ ID NO: 3736 - RNA, 20 nt, Artificial Sequence
  Description of Artificial Sequence: Synthetic oligonucleotide
guccauggcgggcgcggcgg

SEQ ID NO: 3737 - RNA, 20 nt, Artificial Sequence
  Description of Artificial Sequence: Synthetic oligonucleotide
gacguccauggcgggcgcgg

SEQ ID NO: 3738 - RNA, 20 nt, Artificial Sequence
  Description of Artificial Sequence: Synthetic oligonucleotide
uaugcagcagacucgcacag

SEQ ID NO: 3739 - RNA, 20 nt, Artificial Sequence
  Description of Artificial Sequence: Synthetic oligonucleotide
uuuccgcagaagguaagcag

SEQ ID NO: 3740 - RNA, 20 nt, Artificial Sequence
  Description of Artificial Sequence: Synthetic oligonucleotide
ucaaacuagaauagagagag

SEQ ID NO: 3741 - RNA, 20 nt, Artificial Sequence
  Description of Artificial Sequence: Synthetic oligonucleotide
caaacuagaauagagagaga

SEQ ID NO: 3742 - RNA, 20 nt, Artificial Sequence
  Description of Artificial Sequence: Synthetic oligonucleotide
cacccaccuggcugguugac

SEQ ID NO: 3743 - RNA, 20 nt, Artificial Sequence
  Description of Artificial Sequence: Synthetic oligonucleotide
uggaucuaagagaggaggac

SEQ ID NO: 3744 - RNA, 20 nt, Artificial Sequence
  Description of Artificial Sequence: Synthetic oligonucleotide
gauccaggagaugguccacu

SEQ ID NO: 3745 - RNA, 20 nt, Artificial Sequence
  Description of Artificial Sequence: Synthetic oligonucleotide
gucccagcucaucucgcaga

SEQ ID NO: 3746 - RNA, 20 nt, Artificial Sequence
  Description of Artificial Sequence: Synthetic oligonucleotide
ucaucucgcagaugggcauc

SEQ ID NO: 3747 - RNA, 20 nt, Artificial Sequence
  Description of Artificial Sequence: Synthetic oligonucleotide
cuccacucaggaagaggagu

SEQ ID NO: 3748 - RNA, 20 nt, Artificial Sequence
  Description of Artificial Sequence: Synthetic oligonucleotide
ugagccgcagaagccugugu

SEQ ID NO: 3749 - RNA, 20 nt, Artificial Sequence
  Description of Artificial Sequence: Synthetic oligonucleotide
agacacucaggccgccauca

SEQ ID NO: 3750 - RNA, 20 nt, Artificial Sequence
  Description of Artificial Sequence: Synthetic oligonucleotide
gacacucaggccgccaucaa

SEQ ID NO: 3751 - RNA, 20 nt, Artificial Sequence
  Description of Artificial Sequence: Synthetic oligonucleotide
gaccugcaggccuuccgcag

SEQ ID NO: 3752 - RNA, 20 nt, Artificial Sequence
  Description of Artificial Sequence: Synthetic oligonucleotide
accugcaggccuuccgcagu

SEQ ID NO: 3753 - RNA, 20 nt, Artificial Sequence
  Description of Artificial Sequence: Synthetic oligonucleotide
ccugcaggccuuccgcagug

SEQ ID NO: 3754 - RNA, 20 nt, Artificial Sequence
  Description of Artificial Sequence: Synthetic oligonucleotide
cugcuuaccuguggcccugg

SEQ ID NO: 3755 - RNA, 20 nt, Artificial Sequence
  Description of Artificial Sequence: Synthetic oligonucleotide
ggaaguccuacagaguggga

SEQ ID NO: 3756 - RNA, 20 nt, Artificial Sequence
  Description of Artificial Sequence: Synthetic oligonucleotide
aguccuacagagugggaagg

SEQ ID NO: 3757 - RNA, 20 nt, Artificial Sequence
  Description of Artificial Sequence: Synthetic oligonucleotide
gucccaguccccgcugcugg

SEQ ID NO: 3758 - RNA, 20 nt, Artificial Sequence
  Description of Artificial Sequence: Synthetic oligonucleotide
ucccaguccccgcugcuggu

SEQ ID NO: 3759 - RNA, 20 nt, Artificial Sequence
  Description of Artificial Sequence: Synthetic oligonucleotide
gcugucccaguccccgcugc

SEQ ID NO: 3760 - RNA, 20 nt, Artificial Sequence
  Description of Artificial Sequence: Synthetic oligonucleotide
caggcugugagagagaggag

SEQ ID NO: 3761 - RNA, 20 nt, Artificial Sequence
  Description of Artificial Sequence: Synthetic oligonucleotide
gcaggcugugagagagagga

SEQ ID NO: 3762 - RNA, 20 nt, Artificial Sequence
  Description of Artificial Sequence: Synthetic oligonucleotide
agcaggcugugagagagagg

SEQ ID NO: 3763 - RNA, 20 nt, Artificial Sequence
  Description of Artificial Sequence: Synthetic oligonucleotide
ugccaucucuuccugcccuu

SEQ ID NO: 3764 - RNA, 20 nt, Artificial Sequence
  Description of Artificial Sequence: Synthetic oligonucleotide
guacucacgcggugugcacc

SEQ ID NO: 3765 - RNA, 20 nt, Artificial Sequence
  Description of Artificial Sequence: Synthetic oligonucleotide
ggaagugccugggugaggac

SEQ ID NO: 3766 - RNA, 20 nt, Artificial Sequence
  Description of Artificial Sequence: Synthetic oligonucleotide
agggucuagaaaagaggcaa

SEQ ID NO: 3767 - RNA, 20 nt, Artificial Sequence
  Description of Artificial Sequence: Synthetic oligonucleotide
gggucuagaaaagaggcaaa

SEQ ID NO: 3768 - RNA, 20 nt, Artificial Sequence
  Description of Artificial Sequence: Synthetic oligonucleotide
ggucuagaaaagaggcaaag

SEQ ID NO: 3769 - RNA, 20 nt, Artificial Sequence
  Description of Artificial Sequence: Synthetic oligonucleotide
gguagccugggggguggggc

SEQ ID NO: 3770 - RNA, 20 nt, Artificial Sequence
  Description of Artificial Sequence: Synthetic oligonucleotide
ccccuggaaaauagugaaaa

SEQ ID NO: 3771 - RNA, 20 nt, Artificial Sequence
  Description of Artificial Sequence: Synthetic oligonucleotide
cugaccuuccaggaugaguu

SEQ ID NO: 3772 - RNA, 20 nt, Artificial Sequence
  Description of Artificial Sequence: Synthetic oligonucleotide
gagguucucacugaccuucc

SEQ ID NO: 3773 - RNA, 20 nt, Artificial Sequence
  Description of Artificial Sequence: Synthetic oligonucleotide
gcgggccuggaaggaugaga

SEQ ID NO: 3774 - RNA, 20 nt, Artificial Sequence
  Description of Artificial Sequence: Synthetic oligonucleotide
gcguaccuuucucacgaguu

SEQ ID NO: 3775 - RNA, 20 nt, Artificial Sequence
  Description of Artificial Sequence: Synthetic oligonucleotide
cgcguaccuuucucacgagu

SEQ ID NO: 3776 - RNA, 20 nt, Artificial Sequence
  Description of Artificial Sequence: Synthetic oligonucleotide
ggcccguaccucgguagcug

SEQ ID NO: 3777 - RNA, 20 nt, Artificial Sequence
  Description of Artificial Sequence: Synthetic oligonucleotide
gucccaguucuccgcccucc

SEQ ID NO: 3778 - RNA, 20 nt, Artificial Sequence
  Description of Artificial Sequence: Synthetic oligonucleotide
ggaacaagccagggucaugu

SEQ ID NO: 3779 - RNA, 20 nt, Artificial Sequence
  Description of Artificial Sequence: Synthetic oligonucleotide
caaccccuccaucucccagc

SEQ ID NO: 3780 - RNA, 20 nt, Artificial Sequence
  Description of Artificial Sequence: Synthetic oligonucleotide
ugaccuaucgggacaagcaa

SEQ ID NO: 3781 - RNA, 20 nt, Artificial Sequence
  Description of Artificial Sequence: Synthetic oligonucleotide
aguaccuggcagugugauau

SEQ ID NO: 3782 - RNA, 20 nt, Artificial Sequence
  Description of Artificial Sequence: Synthetic oligonucleotide
augugcagaaagaccuggag

SEQ ID NO: 3783 - RNA, 20 nt, Artificial Sequence
  Description of Artificial Sequence: Synthetic oligonucleotide
gggcagcccgccuccgccgc

SEQ ID NO: 3784 - RNA, 20 nt, Artificial Sequence
  Description of Artificial Sequence: Synthetic oligonucleotide
cggccaggcccugccgcuca

SEQ ID NO: 3785 - DNA, 8961 bp, Artificial Sequence
  Description of Artificial Sequence: Synthetic polynucleotide
atatgccaagtacgccccctattgacgtcaatgacggtaaatggcccgcctggcattatgcccagtacatgaccttatgggactttcctacttggcagtacatctacgtattagtcatcgctattaccatggtgatgcggttttggcagtacatcaatgggcgtggatagcggtttgactcacggggatttccaagtctccaccccattgacgtcaatgggagtttgttttggcaccaaaatcaacgggactttccaaaatgtcgtaacaactccgccccattgacgcaaatgggcggtaggcgtgtacggtgggaggtctatataagcagagctggtttagtgaaccgtcagatccgctagagatccgcggccgctaatacgactcactatagggagagccgccaccatgaaacggacagccgacggaagcgagttcgagtcaccaaagaagaagcggaaagtctcctcagagactgggcctgtcgccgtcgatccaaccctgcgccgccggattgaacctcacgagtttgaagtgttctttgacccccgggagctgagaaaggagacatgcctgctgtacgagatcaactggggaggcaggcactccatctggaggcacacctctcagaacacaaataagcacgtggaggtgaacttcatcgagaagtttaccacagagcggtacttctgccccaataccagatgtagcatcacatggtttctgagctggtccccttgcggagagtgtagcagggccatcaccgagttcctgtccagatatccacacgtgacactgtttatctacatcgccaggctgtatcaccacgcagacccaaggaataggcagggcctgcgcgatctgatcagctccggcgtgaccatccagatcatgacagagcaggagtccggctactgctggcggaacttcgtgaattattctcctagcaacgaggcccactggcctaggtacccacacctgtgggtgcgcctgtacgtgctggagctgtattgcatcatcctgggcctgcccccttgtctgaatatcctgcggagaaagcagccccagctgaccttctttacaatcgccctgcagtcttgtcactatcagaggctgccaccccacatcctgtgggccacaggcctgaagtctggaggatctagcggaggatcctctggcagcgagacaccaggaacaagcgagtcagcaacaccagagagcagtggcggcagcagcggcggcagcgacaagaagtacagcatcggcctggccatcggcaccaactctgtgggctgggccgtgatcaccgacgagtacaaggtgcccagcaagaaattcaaggtgctgggcaacaccgaccggcacagcatcaagaagaacctgatcggagccctgctgttcgacagcggcgaaacagccgaggccacccggctgaagagaaccgccagaagaagatacaccagacggaagaaccggatctgctatctgcaagagatcttcagcaacgagatggccaaggtggacgacagcttcttccacagactggaagagtccttcctggtggaagaggataagaagcacgagcggcaccccatcttcggcaacatcgtggacgaggtggcctaccacgagaagtaccccaccatctaccacctgagaaagaaactggtggacagcaccgacaaggccgacctgcggctgatctatctggccctggcccacatgatcaagttccggggccacttcctgatcgagggcgacctgaaccccgacaacagcgacgtggacaagctgttcatccagctggtgcagacctacaaccagctgttcgaggaaaaccccatcaacgccagcggcgtggacgccaaggccatcctgtctgccagactgagcaagagcagacggctggaaaatctgatcgcccagctgcccggcgagaagaagaatggcctgttcggaaacctgattgccctgagcctgggcctgacccccaacttcaagagcaacttcgacctggccgaggatgccaaactgcagctgagcaaggacacctacgacgacgacctggacaacctgctggcccagatcggcgaccagtacgccgacctgtttctggccgccaagaacctgtccgacgccatcctgctgagcgacatcctgagagtgaacaccgagatcaccaaggcccccctgagcgcctctatgatcaagagatacgacgagcaccaccaggacctgaccctgctgaaagctctcgtgcggcagcagctgcctgagaagtacaaagagattttcttcgaccagagcaagaacggctacgccggctacattgacggcggagccagccaggaagagttctacaagttcatcaagcccatcctggaaaagatggacggcaccgaggaactgctcgtgaagctgaacagagaggacctgctgcggaagcagcggaccttcgacaacggcagcatcccccaccagatccacctgggagagctgcacgccattctgcggcggcaggaagatttttacccattcctgaaggacaaccgggaaaagatcgagaagatcctgaccttccgcatcccctactacgtgggccctctggccaggggaaacagcagattcgcctggatgaccagaaagagcgaggaaaccatcaccccctggaacttcgaggaagtggtggacaagggcgcttccgcccagagcttcatcgagcggatgaccaacttcgataagaacctgcccaacgagaaggtgctgcccaagcacagcctgctgtacgagtacttcaccgtgtataacgagctgaccaaagtgaaatacgtgaccgagggaatgagaaagcccgccttcctgagcggcgagcagaaaaaggccatcgtggacctgctgttcaagaccaaccggaaagtgaccgtgaagcagctgaaagaggactacttcaagaaaatcgagtgcttcgactccgtggaaatctccggcgtggaagatcggttcaacgcctccctgggcacataccacgatctgctgaaaattatcaaggacaaggacttcctggacaatgaggaaaacgaggacattctggaagatatcgtgctgaccctgacactgtttgaggacagagagatgatcgaggaacggctgaaaacctatgcccacctgttcgacgacaaagtgatgaagcagctgaagcggcggagatacaccggctggggcaggctgagccggaagctgatcaacggcatccgggacaagcagtccggcaagacaatcctggatttcctgaagtccgacggcttcgccaacagaaacttcatgcagctgatccacgacgacagcctgacctttaaagaggacatccagaaagcccaggtgtccggccagggcgatagcctgcacgagcacattgccaatctggccggcagccccgccattaagaagggcatcctgcagacagtgaaggtggtggacgagctcgtgaaagtgatgggccggcacaagcccgagaacatcgtgatcgaaatggccagagagaaccagaccacccagaagggacagaagaacagccgcgagagaatgaagcggatcgaagagggcatcaaagagctgggcagccagatcctgaaagaacaccccgtggaaaacacccagctgcagaacgagaagctgtacctgtactacctgcagaatgggcgggatatgtacgtggaccaggaactggacatcaaccggctgtccgactacgatgtggaccatatcgtgcctcagagctttctgaaggacgactccatcgacaacaaggtgctgaccagaagcgacaagaaccggggcaagagcgacaacgtgccctccgaagaggtcgtgaagaagatgaagaactactggcggcagctgctgaacgccaagctgattacccagagaaagttcgacaatctgaccaaggccgagagaggcggcctgagcgaactggataaggccggcttcatcaagagacagctggtggaaacccggcagatcacaaagcacgtggcacagatcctggactcccggatgaacactaagtacgacgagaatgacaagctgatccgggaagtgaaagtgatcaccctgaagtccaagctggtgtccgatttccggaaggatttccagttttacaaagtgcgcgagatcaacaactaccaccacgcccacgacgcctacctgaacgccgtcgtgggaaccgccctgatcaaaaagtaccctaagctggaaagcgagttcgtgtacggcgactacaaggtgtacgacgtgcggaagatgatcgccaagagcgagcaggaaatcggcaaggctaccgccaagtacttcttctacagcaacatcatgaactttttcaagaccgagattaccctggccaacggcgagatccggaagcggcctctgatcgagacaaacggcgaaaccggggagatcgtgtgggataagggccgggattttgccaccgtgcggaaagtgctgagcatgccccaagtgaatatcgtgaaaaagaccgaggtgcagacaggcggcttcagcaaagagtctatcctgcccaagaggaacagcgataagctgatcgccagaaagaaggactgggaccctaagaagtacggcggcttcgacagccccaccgtggcctattctgtgctggtggtggccaaagtggaaaagggcaagtccaagaaactgaagagtgtgaaagagctgctggggatcaccatcatggaaagaagcagcttcgagaagaatcccatcgactttctggaagccaagggctacaaagaagtgaaaaaggacctgatcatcaagctgcctaagtactccctgttcgagctggaaaacggccggaagagaatgctggcctctgccggcgaactgcagaagggaaacgaactggccctgccctccaaatatgtgaacttcctgtacctggccagccactatgagaagctgaagggctcccccgaggataatgagcagaaacagctgtttgtggaacagcacaagcactacctggacgagatcatcgagcagatcagcgagttctccaagagagtgatcctggccgacgctaatctggacaaagtgctgtccgcctacaacaagcaccgggataagcccatcagagagcaggccgagaatatcatccacctgtttaccctgaccaatctgggagcccctgccgccttcaagtactttgacaccaccatcgaccggaagaggtacaccagcaccaaagaggtgctggacgccaccctgatccaccagagcatcaccggcctgtacgagacacggatcgacctgtctcagctgggaggtgacagcggcgggagcggcgggagcggggggagcactaatctgagcgacatcattgagaaggagactgggaaacagctggtcattcaggagtccatcctgatgctgcctgaggaggtggaggaagtgatcggcaacaagccagagtctgacatcctggtgcacaccgcctacgacgagtccacagatgagaatgtgatgctgctgacctctgacgcccccgagtataagccttgggccctggtcatccaggattctaacggcgagaataagatcaagatgctgagcggaggatccggaggatctggaggcagcaccaacctgtctgacatcatcgagaaggagacaggcaagcagctggtcatccaggagagcatcctgatgctgcccgaagaagtcgaagaagtgatcggaaacaagcctgagagcgatatcctggtccataccgcctacgacgagagtaccgacgaaaatgtgatgctgctgacatccgacgccccagagtataagccctgggctctggtcatccaggattccaacggagagaacaaaatcaaaatgctgtctggcggctcaaaaagaaccgccgacggcagcgaattcgagcccaagaagaagaggaaagtctaaccggtcatcatcaccatcaccattgagtttaaacccgctgatcagcctcgactgtgccttctagttgccagccatctgttgtttgcccctcccccgtgccttccttgaccctggaaggtgccactcccactgtcctttcctaataaaatgaggaaattgcatcgcattgtctgagtaggtgtcattctattctggggggtggggtggggcaggacagcaagggggaggattgggaagacaatagcaggcatgctggggatgcggtgggctctatggcttctgaggcggaaagaaccagctggggctcgataccgtcgacctctagctagagcttggcgtaatcatggtcatagctgtttcctgtgtgaaattgttatccgctcacaattccacacaacatacgagccggaagcataaagtgtaaagcctagggtgcctaatgagtgagctaactcacattaattgcgttgcgctcactgcccgctttccagtcgggaaacctgtcgtgccagctgcattaatgaatcggccaacgcgcggggagaggcggtttgcgtattgggcgctcttccgcttcctcgctcactgactcgctgcgctcggtcgttcggctgcggcgagcggtatcagctcactcaaaggcggtaatacggttatccacagaatcaggggataacgcaggaaagaacatgtgagcaaaaggccagcaaaaggccaggaaccgtaaaaaggccgcgttgctggcgtttttccataggctccgcccccctgacgagcatcacaaaaatcgacgctcaagtcagaggtggcgaaacccgacaggactataaagataccaggcgtttccccctggaagctccctcgtgcgctctcctgttccgaccctgccgcttaccggatacctgtccgcctttctcccttcgggaagcgtggcgctttctcatagctcacgctgtaggtatctcagttcggtgtaggtcgttcgctccaagctgggctgtgtgcacgaaccccccgttcagcccgaccgctgcgccttatccggtaactatcgtcttgagtccaacccggtaagacacgacttatcgccactggcagcagccactggtaacaggattagcagagcgaggtatgtaggcggtgctacagagttcttgaagtggtggcctaactacggctacactagaagaacagtatttggtatctgcgctctgctgaagccagttaccttcggaaaaagagttggtagctcttgatccggcaaacaaaccaccgctggtagcggtggtttttttgtttgcaagcagcagattacgcgcagaaaaaaaggatctcaagaagatcctttgatcttttctacggggtctgacactcagtggaacgaaaactcacgttaagggattttggtcatgagattatcaaaaaggatcttcacctagatccttttaaattaaaaatgaagttttaaatcaatctaaagtatatatgagtaaacttggtctgacagttaccaatgcttaatcagtgaggcacctatctcagcgatctgtctatttcgttcatccatagttgcctgactccccgtcgtgtagataactacgatacgggagggcttaccatctggccccagtgctgcaatgataccgcgagacccacgctcaccggctccagatttatcagcaataaaccagccagccggaagggccgagcgcagaagtggtcctgcaactttatccgcctccatccagtctattaattgttgccgggaagctagagtaagtagttcgccagttaatagtttgcgcaacgttgttgccattgctacaggcatcgtggtgtcacgctcgtcgtttggtatggcttcattcagctccggttcccaacgatcaaggcgagttacatgatcccccatgttgtgcaaaaaagcggttagctccttcggtcctccgatcgttgtcagaagtaagttggccgcagtgttatcactcatggttatggcagcactgcataattctcttactgtcatgccatccgtaagatgcttttctgtgactggtgagtactcaaccaagtcattctgagaatagtgtatgcggcgaccgagttgctcttgcccggcgtcaatacgggataataccgcgccacatagcagaactttaaaagtgctcatcattggaaaacgttcttcggggcgaaaactctcaaggatcttaccgctgttgagatccagttcgatgtaacccactcgtgcacccaactgatcttcagcatcttttactttcaccagcgtttctgggtgagcaaaaacaggaaggcaaaatgccgcaaaaaagggaataagggcgacacggaaatgttgaatactcatactcttcctttttcaatattattgaagcatttatcagggttattgtctcatgagcggatacatatttgaatgtatttagaaaaataaacaaataggggttccgcgcacatttccccgaaaagtgccacctgacgtcgacggatcgggagatcgatctcccgatcccctagggtcgactctcagtacaatctgctctgatgccgcatagttaagccagtatctgctccctgcttgtgtgttggaggtcgctgagtagtgcgcgagcaaaatttaagctacaacaaggcaaggcttgaccgacaattgcatgaagaatctgcttagggttaggcgttttgcgctgcttcgcgatgtacgggccagatatacgcgttgacattgattattgactagttattaatagtaatcaattacggggtcattagttcatagcccatatatggagttccgcgttacataacttacggtaaatggcccgcctggctgaccgcccaacgacccccgcccattgacgtcaataatgacgtatgttcccatagtaacgccaatagggactttccattgacgtcaatgggtggagtatttacggtaaactgcccacttggcagtacatcaagtgtatc

SEQ ID NO: 3786 - DNA, 20 bp, Unknown
  Description of Unknown: CD3 target sequence
ttcgtatctgtaaaaccaag

SEQ ID NO: 3787 - DNA, 20 bp, Unknown
  Description of Unknown: CD7 target sequence
cctacctgtcaccaggacca

SEQ ID NO: 3788 - DNA, 20 bp, Unknown
  Description of Unknown: CD52 target sequence
ctcttacctgtaccataacc

SEQ ID NO: 3789 - DNA, 20 bp, Unknown
  Description of Unknown: PD1 target sequence
cacctacctaagaaccatcc

SEQ ID NO: 3790 - DNA, 20 bp, Unknown
  Description of Unknown: B2M target sequence
actcacgctggatagcctcc

SEQ ID NO: 3791 - DNA, 20 bp, Unknown
  Description of Unknown: CD5 target sequence
actcacccagcatccccagc

SEQ ID NO: 3792 - DNA, 20 bp, Unknown
  Description of Unknown: CIITA target sequence
cactcaccttagcctgagca

SEQ ID NO: 3793 - DNA, 20 bp, Unknown
  Description of Unknown: CD2 target sequence
cacgcacctggacagctgac

SEQ ID NO: 3794 - DNA, 20 bp, Artificial Sequence
  Description of Artificial Sequence: Synthetic oligonucleotide
ggaggctatccagcgtgagt

SEQ ID NO: 3795 - protein, 6 aa, Artificial Sequence
  Description of Artificial Sequence: Synthetic peptide
EAIQRE

SEQ ID NO: 3796 - DNA, 20 bp, Artificial Sequence
  Description of Artificial Sequence: Synthetic oligonucleotide
cttggttttacagatacgaa

SEQ ID NO: 3797 - protein, 7 aa, Artificial Sequence
  Description of Artificial Sequence: Synthetic peptide
LGFTDTN

1. A method for producing a modified immune cell with reduced immunogenicity and/or increased anti-neoplasia activity by multiplexed editing, the method comprising: modifying a target nucleobase in at least four genes or regulatory elements thereof in an immune cell, thereby generating the modified immune cell with reduced immunogenicity and/or increased anti-neoplasia activity.

2. (canceled)

3. The method of claim 1, wherein at least one of the four genes is a checkpoint inhibitor gene, an immune response regulation gene, or an immunogenic gene.

4. (canceled)

5. The method of claim 1, wherein expression of at least one of the four genes is reduced by at least 80% as compared to a control cell without the modification.

6-8. (canceled)

9. The method of claim 1, wherein the four genes encode polypeptides that form a TCR complex.

10. The method of claim 1, wherein one of the four genes encodes a polypeptide selected from the group consisting of TRAC, a check point inhibitor, PDCD1, a T cell marker, CD52, CD7, CD3 epsilon, CD3 gamma, CD3 delta, TRBC1, TRBC2, CD4, CD5, CD7, CD30, CD33, CD52, CD70, B2M, and CIITA.

11-28. (canceled)

29. The method of claim 1, wherein the modifying comprises deaminating the single target nucleobase.

30. The method of claim 29, wherein the deaminating is performed by a polypeptide comprising a deaminase.

31. The method of claim 30, wherein the deaminase is associated with a nucleic acid programmable DNA binding protein (napDNAbp) to form a base editor.

32. The method of claim 31, wherein the deaminase is fused to the nucleic acid programmable DNA binding protein (napDNAbp).

33. (canceled)

34. The method of claim 32, wherein the napDNAbp comprises a Cas9 nickase or nuclease dead Cas9.

35. The method of claim 32, wherein the deaminase is a cytidine deaminase that converts a cytosine to a thymine or an adenosine deaminase that converts an adenosine (A) to a guanine (G).

36. (canceled)

37. The method of claim 35, wherein the base editor further comprises a uracil glycosylase inhibitor.

38-42. (canceled)

43. The method of claim 40, wherein the modifying comprises contacting the immune cell with a base editor and a guide nucleic acid sequence comprising a sequence selected from the group consisting of UUCGUAUCUGUAAAACCAAG, CCUACCUGUCACCAGGACCA, CUCUUACCUGUACCAUAACC, CACCUACCUAAGAACCAUCC, ACUCACGCUGGAUAGCCUCC, ACUCACCCAGCAUCCCCAGC, CACUCACCUUAGCCUGAGCA, and CACGCACCUGGACAGCUGAC.

44-55. (canceled)

56. The method of claim 1, wherein the single target nucleobase is in an exon, a splice donor site or a splice acceptor site.

57. The method of claim 1, wherein the target nucleobase is in a splice acceptor or splice donor of a TRAC, PDCD1, CD52, CD7, B2M, CD2, CD5, or CIITA gene.

58-64. (canceled)

65. The method of claim 1, wherein the immune cell is a human cytotoxic T cell, a regulatory T cell, a T helper cell, a dendritic cell, a B cell, or a NK cell.

66-69. (canceled)

70. The method of claim 1, wherein the immune cell is derived from a single human donor.

71. The method of claim 1, further comprising contacting the immune cell with a lentivirus comprising a polynucleotide that encodes an exogenous functional chimeric antigen receptor (CAR) or a functional fragment thereof.

72-74. (canceled)

75. The method of claim 71, wherein the CAR specifically binds a marker associated with neoplasia.

76. The method of claim 75, wherein the neoplasia is a T cell cancer, a B cell cancer, a lymphoma, a leukemia, or a multiple myeloma.

77. The method of claim 76, wherein the CAR specifically binds CD7 or BCMA.

78-85. (canceled)

86. A modified immune cell produced according to the method of claim 1.

87. (canceled)

88. A modified immune cell with reduced immunogenicity or increased anti-neoplasia activity, wherein the modified immune cell comprises a single target nucleobase modification in each one of at least four gene sequences or regulatory elements thereof, wherein the gene sequences are selected from the group consisting of CD3, CD5, CD52, CD7, CD2, TRAC, CD3 epsilon, CD3 gamma, CD3 delta, TRBC1, TRBC2, CD4, CD30, CD33, CD70, B2M, and CIITA or a regulatory element of each thereof, and the immune cell is a human immune cell selected from the group consisting of a cytotoxic T cell, a regulatory T cell, a T helper cell, a dendritic cell, a B cell, and a NK cell.

89-177. (canceled)

178. A composition comprising a base editor comprising a nucleic acid programmable DNA binding protein (napDNAbp), a deaminase, and a uracil glycosylate inhibitor, and a guide nucleic acid sequence, wherein the guide nucleic acid sequence comprises a sequence selected from the group consisting of UUCGUAUCUGUAAAACCAAG, CCUACCUGUCACCAGGACCA, CUCUUACCUGUACCAUAACC, CACCUACCUAAGAACCAUCC, ACUCACGCUGGAUAGCCUCC, ACUCACCCAGCAUCCCCAGC, CACUCACCUUAGCCUGAGCA, and CACGCACCUGGACAGCUGAC.

179. (canceled)

180. The composition of claim 178, wherein the napDNAbp comprises a Cas9 nickase or nuclease dead Cas9 and wherein the deaminase is a cytidine or adenosine deaminase.

181-184. (canceled)

185. A method for producing a modified immune cell with reduced immunogenicity and/or increased anti-neoplasia activity, the method comprising:
a) modifying a single target nucleobase in a first gene sequence or a regulatory element thereof in an immune cell;
b) modifying a second gene sequence or a regulatory element thereof in the immune cell with a Cas12 polypeptide, wherein the Cas12 polypeptide generates a site-specific cleavage in the second gene sequence; wherein each of the first gene and the second gene is an immunogenic gene, a checkpoint inhibitor gene, or an immune response regulation gene; and
c) contacting the modified immune cell with a lentivirus comprising a polynucleotide encoding an exogenous functional chimeric antigen receptor (CAR) or a functional fragment thereof, thereby generating a modified immune cell with reduced immunogenicity and/or increased anti-neoplasia activity.

186. (canceled)

187. The method of claim 185, wherein the polynucleotide encoding the CAR or the functional fragment thereof is inserted into the site specific cleavage generated by the Cas12 polypeptide.

188. (canceled)

189. The method of claim 185, wherein each of the first gene and the second gene is an immunogenic gene, a checkpoint inhibitor gene, or an immune response regulation gene.

190-220. (canceled)

221. A modified immune cell with reduced immunogenicity and/or increased anti-neoplasia activity, the modified immune cell comprising:
a) a single target nucleobase modification in a first gene sequence or a regulatory element thereof in an immune cell; and
b) a modification in a second gene sequence or a regulatory element thereof, wherein the modification is an insertion of an exogenous chimeric antigen receptor (CAR) or a functional fragment thereof or an exogenous T cell receptor or a functional fragment thereof;
wherein each of the first gene and the second gene is a immunogenic gene, a checkpoint inhibitor gene, or immune response regulation gene.

222-263. (canceled)

264. A method for producing a modified immune cell with increased anti-neoplasia activity, the method comprising: modifying a single target nucleobase in a Cbl Proto Oncogene B (CBLB) gene sequence or a regulatory element thereof in an immune cell, wherein the modification reduces an activation threshold of the immune cell compared with an immune cell lacking the modification; thereby generating a modified immune cell with increased anti-neoplasia activity.

265. A composition comprising the modified immune cell of claim 264.

266-267. (canceled)

268. A composition comprising a polynucleotide encoding a base editor polypeptide, wherein the base editor polypeptide comprises a nucleic acid programmable DNA binding protein (napDNAbp) and an adenosine or cytidine deaminase and at least four different guide nucleic acid sequences for base editing.

269-277. (canceled)

278. An immune cell comprising the composition of claim 268, wherein the composition is introduced into the immune cell with electroporation, nucleofection, viral transduction, or a combination thereof.

279-283. (canceled)
